(19) United States
(12) Patent Application Publication
(10) Pub. No.: US 2023/0295666 A1
(43) Pub. Date: Sep. 21, 2023

(54) SUPER-ENCHANCERS FOR RECOMBINANT GENE EXPRESSION IN CHO CELLS

(71) Applicant: LEK Pharmaceuticals d.d., Ljubljana (SI)

(72) Inventors: Matjaž Vogelsang, Ljubljana (SI); Nika Tuta, LJUBLJANA (SI); Dominik Gaser, LJUBLJANA (SI)

(73) Assignee: LEK Pharmaceuticals d.d., Ljubljana (SI)

(21) Appl. No.: 17/919,890

(22) PCT Filed: Apr. 21, 2021
(86) PCT No.: PCT/EP2021/060439

§ 371 Date: Oct. 19, 2022

(30) Foreign Application Priority Data
Apr. 22, 2020 (EP) 20170926.8

(51) Int. Cl. C12N 15/90; C12N 15/11; C12N 9/22; C12N 5/071; C07K 16/00

(52) U.S. Cl. CPC C12N 15/907; C07K 16/00; C12N 5/0682; C12N 9/22; C12N 15/11; C07K 2317/14; C12N 2310/20; C12N 2800/80

(57) ABSTRACT

Abstract: The present invention belongs to the field of biotechnology, and specifically relates to recombinant gene expression. The invention concerns a method of recombinant gene expression from a Chinese Hamster Ovary (CHO) cell, by using super-enhancer sequences for increased gene expression. Thus, the invention provides a method for producing an engineered CHO cell by introducing into the cell an exogenous nucleic acid molecule into or within 500 kb upstream or downstream of a super-enhancer as expression-enhancing sequence. The invention further provides an engineered CHO cell produced by the method. The invention further provides a method of producing a recombinant polypeptide. The invention is further directed to the use of a super-enhancer for transgene expression.

[0001] The present invention belongs to the field of biotechnology, and specifically relates to recombinant gene expression.

[0002] The invention concerns a method of recombinant gene expression from a Chinese Hamster Ovary (CHO) cell by using super-enhancer sequences for increased gene expression. Thus, the invention provides a method for producing an engineered CHO cell by introducing into the cell an exogenous nucleic acid molecule into or within 500 kb upstream or downstream of a super-enhancer as expression-enhancing sequence. The invention further provides an engineered CHO cell produced by the method. The invention further provides a method of producing a recombinant polypeptide. The invention is further directed to the use of a super-enhancer for transgene expression.

### BACKGROUND OF THE INVENTION

[0003] Chinese Hamster Ovary (CHO) cells are currently the preferred mammalian cell line used for production of recombinant proteins, especially proteins used for therapeutic applications. The main reasons for the use of CHO cells for recombinant gene expression is that CHO cells are capable of adapting and growing in suspension culture, which is ideal for large scale production, and CHO cells can grow in serum-free culture in chemically defined media, which ensures reproducibility. In addition, CHO cells allow human-like post-translational modifications to recombinant proteins, such as glycosylation of glycoproteins, as well as correct three-dimensional folding of the recombinant proteins. Meanwhile, expression systems for recombinant protein production from CHO cells are well-established. However, despite the availability of various expression systems, the challenge of efficient gene transfer and stability of the integrated gene for high expression of a recombinant protein still exists.

[0004] Current development of production cell lines is most commonly based on random integration of the transgene into the genome, resulting in low-level recombinant protein production and tedious screening of hundreds of clones. The present invention focuses on two problems commonly encountered during recombinant protein production from CHO cells, low quantity of protein and genetic instability of CHO cell lines used for recombinant gene expression.

[0005] In order to obtain high quantities of recombinant protein it is commonly tried to introduce not only one copy of a so called expression cassette including an exogenous nucleotide for recombinant gene expression into the cell chosen for recombinant protein production, but to try to introduce several copies of the expression cassette into a cell and subsequently select those modified host cells which have the optimal high number of expression cassettes in order to express the maximal amount of the protein of interest (POI). This strategy has at least two drawbacks:

[0006] First, the more copies of the expression cassette are introduced into the cell the more likely it is that over time the sequences of these expression cassettes recombine with each other due to the similarity of their sequences, which promotes recombination. As a consequence, rearrangements of nucleotide sequences within the modified host cell result in an instable integrity and copy number of the transgene sequence in the modified host cell used for protein expression. This results in a lower recombinant protein expression of the modified cell over time. In the worst case these unwanted recombination processes result in altered sequences of the POI, thereby not only decreasing the recombinant protein expression rate, but also decreasing the quality, because the recombinant protein gets a mixture of different variants of the POI, for example truncated or mutated versions of the POI, or POI with duplicated domains and region, etc.

[0007] Second, it is commonly recognized that a high copy number of an expression cassette is no guarantee for a high expression rate of the POI. Likely, a too high number of the expression cassette results in some kind of overburden or overstrain of the molecular machinery needed for protein expression of the modified host cell and thereby the expression rate of the POI goes down once the copy number of the expression cassette within the modified host cell exceeds a certain threshold.

[0008] Different solutions to the above-described problems associated with available expression systems have been suggested in the art.

[0009] WO 2019/038338 A1 overcomes the problems of prior art expression systems by introducing several expression cassettes into a cell which expression cassettes all code for the same mature recombinant POI, but which expression cassettes have different nucleotide sequences. For example, the expression cassettes may have different promoters, different terminators, different signal sequences, etc. and the coding sequence of the POI may be the same in the expression cassettes, or may be different in the different expression cassettes, however the amino acid sequence of the POI is always the same.

[0010] WO2017/184183 A1 provides a cell that contains an exogenous nucleic acid sequence integrated at a specific site within an enhanced expression locus, wherein the exogenous nucleic acid sequence encodes a bispecific antigen-binding protein.

[0011] One of the most essential functions of the active genome is gene transcription. Regions of the DNA that are bound by proteins that control transcription are called regulatory regions, which include enhancers, activators, promoters and insulators. Gene expression is controlled by enhancers, which are cell-type specific and activate transcription from the core promoters of their target genes. A typical mammalian genome contains between 400,000 and 1.4 million putative enhancers and it is estimated that between 10,000 and 150,000 enhancers are typically active in any one cell type. Enhancers are generally a few hundred base pairs in length and have been identified by using a variety of high-throughput techniques, including DNase-seq, ATAC-seq (both detect nucleosome-free regions of the genome representing active regulatory regions) and ChIP-seq (detect specific histone modification features representing enhancers).

[0012] Recently, WA Whyte et al. (Cell 153, Apr. 11, 2013, 307-319) reported the discovery of a new class of regulatory elements called “super-enhancers”, which have been defined to describe domains consisting of clusters of transcriptional enhancers that are densely occupied by master regulator transcription factors and are responsible to drive high-level expression of key genes that define cell identity and control cell state. Super-enhancers span large regions of chromatin with unusually high levels of master transcription factors domains, significant amounts of H3K4me1 and H3K27Ac histone modification and significant amounts of Mediator (MED1) occupancy. These super-enhancers differ from typical enhancers in size, transcription factor density and content, ability to activate transcription and sensitivity to perturbation. Super-enhancers are proposed to regulate nearby genes at the distances of up to 100kb and even up to 1-10Mb in some cases.

### SUMMARY OF THE INVENTION

[0013] The present invention is based on the identification of super-enhancers throughout the genome of the CHO production cell line. These super-enhancers (also designated herein as “expression-enhancing sequence”) are identified to drive high-level expression of nearby genes. It has been discovered in the present invention that these super-enhancers can beneficially be used for high-level expression of nearby-integrated transgenes.

[0014] Thus, the basic principle of the present invention is to introduce into a CHO cell an expression cassette including a transgene of interest within or in close proximity to a super-enhancer domain in order to achieve a stable and high-level expression of the transgene and to thereby produce the recombinant polypeptide or recombinant protein encoded by the transgene in high amounts.

[0015] In particular, the inventors have identified super-enhancer sequences in the CHO genome, which represent hot-spots for rapid development of production cell line, capable of producing high amounts of recombinant protein. Using targeted integration, a transgene of interest (TOI) can be integrated within or in proximity to the identified regions in order to achieve high-level transgene expression, resulting in high-yield production of recombinant protein. Moreover, identified super-enhancer sequences can be used for the design of expression cassettes or expression vectors for stable and high-level expression of recombinant protein from CHO production cell lines or, in consistency with this concept, production cell lines of other rodent species.

[0016] Thus, in a first aspect the present invention provides a method of producing an engineered Chinese Hamster Ovary (CHO) cell, the method comprising: introducing into the CHO cell one or more of a construct for integration of an exogenous nucleic acid molecule into and/or within 500 kb upstream or downstream of an expression-enhancing sequence in the genome of the cell, the expression-enhancing sequence being at least 90% identical to a sequence selected from any one of SEQ ID NOs: 1-47.

[0017] In a further aspect, the present invention provides an engineered cell produced by the method as described in the first aspect.

[0018] In another embodiment, the present invention provides a method of producing a recombinant polypeptide, the method comprising:
[0019] (i) introducing into a CHO cell one or more of a construct for integration of an exogenous nucleic acid molecule into and/or within 500 kb upstream or downstream of an expression-enhancing sequence in the genome of the cell, the expression-enhancing sequence being at least 90% identical to a sequence selected from any one of SEQ ID NOs: 1-47, to produce an engineered cell,
[0020] (ii) culturing the engineered cell to recombinantly express the exogenous nucleic acid to produce a recombinant polypeptide encoded by the exogenous nucleic acid, and
[0021] (iii) isolating the recombinant polypeptide.

[0022] In another embodiment, the present invention provides the use of a nucleic acid sequence being at least 90% identical to a sequence selected from any one of SEQ ID NOs: 1-47 for transgene expression.

### DESCRIPTION OF FIGURES

[0023] FIG. 1: Comparison of the expression levels of three groups of genes: 1) 40 genes within 100kb proximity to several identified super-enhancers; 2) 37 genes within 100 kb proximity to identified typical regulatory regions (e.g. enhancers or promoters); and 3) 40 randomly selected genes.

[0024] FIGS. 2-11 show the results of a comparison experiment of recombinant expression levels in CHO cells after targeted transgene integration into super enhancer regions or within proximity (50-100 kb) to super enhancer regions versus random integration.

[0025] FIG. 2: Results of mRNA levels for heavy chain gene of IgG1.

[0026] FIG. 3: Results of mRNA levels for light chain gene of IgG1.

[0027] FIG. 4: Results of light chain gene copy number of IgG1.

[0028] FIG. 5: Results of heavy chain gene copy number of IgG1.

[0029] FIG. 6: Results of fed batch productivity of IgG1.

[0030] FIG. 7: Results of simple batch productivity of IgG1.

[0031] FIG. 8: Results of Cell-specific productivity from day 0 to day 4 of the simple batch proces s for IgG1 project.

[0032] FIG. 9: Results of mRNA levels for heavy chain gene of IgG4.

[0033] FIG. 10: Results of fed batch productivity of IgG4.

[0034] FIG. 11: Results of Cell-specific productivity from day 0 to day 4 of the simple batch process for IgG4 project

### DETAILED DESCRIPTION OF THE INVENTION

[0035] In the first aspect, there is provided a method of producing an engineered rodent cell. The cell is preferably a hamster cell, most preferably a Chinese Hamster Ovary (CHO) cell. In other embodiments, the rodent includes the species mice, rats, squirrels, prairie dogs, chipmunks, chinchillas, porcupines, beavers, guinea pigs, gerbils and capybaras, preferably mice and rats. Hence, any reference to a CHO cell as provided herein is not intended to be limiting to the CHO cell, but instead the CHO cell can be any rodent cell as described above.

[0036] The Chinese Hamster Ovary (CHO) cell (also designated herein as “host cell”) can be of any CHO cell line used in the art, such as CHO-K1, CHO-DXB11, CHO-S, CHO-DG44 and their derivatives. A commonly used cell line is DHFR⁻ CHO cell line which is auxotrophic for glycine, thymidine and hypoxanthine, and can be transformed to the DHFR⁺ phenotype using DHFR CDNA as an amplifiable dominant marker. One such known DHFR⁻ CHO cell line is DKXB11 (Urlaub et.al., (1980) Proc. Natl. Acad. Sci. USA 77:4216). Other cell lines developed for specific selection or amplification schemes will also be useful in the method of the present invention as described herein.

[0037] CHO cells and cell lines can be obtained from various sources such as the American Type Culture Collection (ATCC, Manassas, VA USA), the Deutsche Sammlung von Mikroorganismen und Zellkulturen GmbH (DSMZ; Braunschweig, Germany), or from commercial vendors such as Merck KGaA (Darmstadt, Germany), GE Healthcare (Buckinghamshire, Great Britain), or Thermo Fischer (Waltham, MA USA).

[0038] Unless otherwise stated, the CHO genome referenced herein refers to the Chinese hamster Assembly CHOK1S_HZDv1 from Eagle Genomics Ltd. dated 2017/06/30 GenBank assembly accession: GCA_900186095.1.

[0039] The method of the present invention, in particular, comprises the introduction of a construct for integration of an exogenous nucleic acid molecule into the CHO cell.

[0040] The term “exogenous nucleic acid molecule” refers to a nucleic acid molecule, typically a transgene, that is integrated at a site in a cell that is not the natural site for the nucleic acid molecule. For example, the nucleic acid molecule may naturally exist in the cell at a different site. Alternatively, the nucleic acid molecule may originate from a different cell. Typically, the exogenous nucleic acid encodes a polypeptide.

[0041] The construct, typically, is in the form of an expression cassette including a transgene of interest. “Expression cassette” means a polynucleotide sequence which typically comprises at least a promoter sequence, a start codon, a nucleic acid sequence, typically a transgene, coding for a protein of interest which is intended to be recombinantly expressed (POI), a stop codon and a terminator. The exogenous nucleic acid to be integrated into the genome of the CHO cell thus can include the transgene operably linked to a promoter that is functional in the engineered cell. The promoter sequence can be endogenous to the coding sequence. In some embodiments, the coding sequence is operably linked to a heterologous promoter sequence. Expression of the exogenous nucleic acid molecule can be further optimized using techniques known in the art. For example, the expression cassette may comprise additional regulatory and other sequences such as signal sequences, enhancers, introns, IRES- sequences, etc. The expression cassette might comprise additional parts, which parts are not directly needed for the expression of the POI, such as for example the origin of replication (ori), antibiotic resistance gene, or metabolic selection marker.

[0042] In the method of the present invention, the introduction of the construct into the CHO cell is typically achieved by transfection according to methods well-established in the art.

[0043] “Transfection” of a cell with a transgene of interest (typically meaning an expression cassette including the transgene) might result in transfected host cells (or transformed host cells, which is the same), wherein said host cells have integrated said transgene into their chromosomes. Said transgene might be integrated once or several times into said chromosome, preferably it is integrated several times into a chromosome, provided that integration is achieved at the integration site as defined herein.

[0044] Thus, in the method of the present invention, introducing the construct into the CHO cell leads to integration of the exogenous nucleotide sequence into the genome of the cell.

[0045] Typically, the integration of the exogenous nucleic acid molecule can be achieved by the CRISPR (Clustered Regulatory Interspaced Short Palindromic Repeats)/Cas9 method, TALEN (Transcription Activator-Like Effector Nuclease)-based method or ZFN (zinc-finger nuclease)-based method.

[0046] A homology recombination (HR) construct for insertion of an exogenous nucleic acid molecule at a target site within or near the super-enhancer described herein can be designed. The construct typically includes a first homology arm that is homologous to a sequence upstream of the target site and a second homology arm that is homologous to a sequence downstream of the target site. Each homology arm can include, for example, 200 to 1500 nucleotides (e.g., 200-250, 200-400, 250-500, 300-500, 400-600, 450-650, 500-800, 550-750, 650-900, 800-1000, 950-1200, or 1000-1500 nucleotides). The HR construct can further include multiple cloning sites between the two homology arms such that a gene to be inserted into the genome can be ligated into the construct. Alternatively, an HR construct containing the gene flanked by the two homologous sequences can be constructed using techniques known in the art, e.g., PCR. The HR construct can be used in a TALEN or CRISPR/Cas9 system to insert the nucleic acid molecule into the genome of the CHO cell.

[0047] TALEN and CRISPR/Cas9 methods both work by introducing a double-stranded DNA break in the genome at a target site. Based on the selected site, an HR construct harboring the nucleic acid molecule to be inserted at the target site can be designed and constructed.

[0048] CRISPR/Cas9 requires a gRNA specific to the targeted site and the endonuclease Cas9. The target site may be any sequence (about 20 nucleotides) that is unique compared to the rest of the genome and is immediately upstream of a Protospacer Adj acent Motif (PAM). Upon binding of the Cas9/gRNA complex to the target site, Cas9 cleaves the DNA. A skilled practitioner would be able to design a CRISPR/Cas9 construct directed at a target site.

[0049] TALEN utilizes a chimeric nuclease that contains an artificial DNA-binding domain of transcription activator-like effector (TALE) proteins and the catalytic domain of restriction endonuclease Fokl. As the code of DNA recognition by TALE proteins has been deciphered, an artificial DNA-binding domain for recognition of any DNA sequence can be designed. To minimize off-site effects, TALEN method can use a pair of chimeric nucleases that each recognizes a sequence on either side of the double-stranded DNA break site. A skilled practitioner would be able to design a TALEN construct directed at the selected site.

[0050] Zinc-finger nucleases (ZFNs) are artificial restriction enzymes generated by fusing a zinc finger DNA-binding domain to a DNA-cleavage domain. Zinc finger domains can be engineered to target specific desired DNA sequences, and this enables zinc-finger nucleases to target unique sequences within complex genomes. Each ZF set is linked to a cleavage domain, which must dimerize to cut DNA. Cleavage of the intended target gene can lead to disruption of its coding sequence by inaccurate repair through nonhomologous end joining. When a homologous donor DNA is introduced along with the ZFNs, it can be incorporated at the target by homologous recombination.

[0051] Preferably, integration of the exogenous nucleic acid molecule is achieved by the CRISPR /Cas9 method.

[0052] Integration of the exogenous nucleic acid molecule into the genome of a cell can be verified using methods known in the art. The engineered cells can be cultured under suitable conditions to express the nucleic acid molecule. Whether the engineered cell exhibits enhanced expression can also be determined using methods known in the art, e.g., ELISA, or RT-PCR.

[0053] The construct is integrated into the genome of the CHO cell at the target site (or “integration site”, which is the same), which is located within the super-enhancer or within 500 kb upstream or downstream of the super-enhancer. The construct can be integrated into the genome of the cell at one target site as described herein or at more than one target site, such as two, three or multiple target sites. In this case, the construct is integrated into the genome of the CHO cell at the target sites, which are located within the super-enhancer and/or within 500 kb upstream or downstream of the super-enhancer(s).

[0054] The super-enhancer can be selected from a sequence that is at least 90%, preferably at least 91%, 92%, 93%, 94% further preferably at least 95%, 96%, 97% 98% or 99% identical to a sequence selected from any one of SEQ ID NOs: 1-47, or fragments thereof. In a particularly preferred embodiment, the super-enhancer is selected from any one of SEQ ID NOs: 1-47, or fragments thereof.

[0055] A suitable program for the determination of a level of identity is the nucleotide blast program (blastn) of NCBI’s Basic Local Alignment Search Tool, using the “Align two or more sequences” option and standard settings (http://blast.ncbi.nlm.nih.gov/Blast.cgi). As used herein, nucleotide sequence percent identity can be determined using a web based Clustal Omega, a multiple sequence alignment program with default parameters [Sievers and Higgins, Protein Sci. 2018 Jan; 27(1):135-1452018]. The percent identity value is a single numeric score determined for each pair of aligned sequences. It measures the number of identical residues (“matches”) in relation to the length of the alignment.

[0056] It could be shown in the present invention that the super-enhancer sequences are highly conserved within rodent species, typically falling within 90% sequence identity, in particular within regulatory sequences, such as the one or more enhancer sequences clustered within a super-enhancer sequence. Therefore, even if not explicitly described in detail for any other rodent cell than a CHO cell, the invention as described herein is not restricted to a CHO cell but can be performed in any rodent cell due to high sequence conservation.

[0057] The group of sequences comprising the SEQ ID Nos: 1-47 define regions within the CHO genome, which are identified in the present invention as super-enhancers. The locations of these super-enhancer regions within the CHO genome are shown in Table 1.

TABLE 1

List and location of CHO super-enhancer regions according to SEQ ID NO. 1-47 (Sequence locations referring to Chinese hamster Assembly CHOK1S_HZDv1 from Eagle Genomics Ltd. dated 2017/06/30; GenBank assembly accession: GCA_900186095.1.)

| SEQ ID NO. | Location (scaffold_ID:start-stop) | SEQ ID NO. | Location (scaffold_ID:start-stop) |
|---|---|---|---|
| 1 | scaffold_0:127003236-127044012 | 25 | scaffold_16:33019037-33099603 |
| 2 | scaffold_0:127961999-127994763 | 26 | scaffold_16:34171408-34232652 |
| 3 | scaffold_1:5717943-5795504 | 27 | scaffold_19:38090598-38127487 |
| 4 | scaffold_1:96135496-96169600 | 28 | scaffold_202:25-78873 |
| 5 | scaffold_1:97016870-97051042 | 29 | scaffold_21:9452150-9482525 |
| 6 | scaffold_2:8990390-9071387 | 30 | scaffold_22:1971510-2008686 |
| 7 | scaffold_3:14201037-14232664 | 31 | scaffold_24:4856485-4948413 |
| 8 | scaffold_3:22455362-22480256 | 32 | scaffold_29:3784349-3827895 |
| 9 | scaffold_5:76073260-76113194 | 33 | scaffold_30:19104144-19104461 |
| 10 | scaffold_7:12057731-12105340 | 34 | scaffold_31:12785915-12827890 |
| 11 | scaffold_7:13607059-13619987 | 35 | scaffold_36:13274461-13303950 |
| 12 | scaffold_8:21329984-21392924 | 36 | scaffold_36:4881585-4935558 |
| 13 | scaffold_8:70124524-70197737 | 37 | scaffold_36:7709296-7803892 |
| 14 | scaffold_9:14918802-14981190 | 38 | scaffold_41:12017975-12063967 |
| 15 | scaffold_9:43934890-44003064 | 39 | scaffold_45:3901418-3950027 |
| 16 | scaffold_9:47068117-47112880 | 40 | scaffold_51:4864782-4934481 |
| 17 | scaffold_10:48106631-48149473 | 41 | scaffold_54:2219944-2303066 |
| 18 | scaffold_10:61021765-61110763 | 42 | scaffold_56:3494926-3554357 |
| 19 | scaffold_10:756101-843574 | 43 | scaffold_64:337435-383012 |
| 20 | scaffold_12:27781971-27828679 | 44 | scaffold_64:397437-420302 |
| 21 | scaffold_12:32514411-32671314 | 45 | scaffold_65:1291309-1351750 |
| 22 | scaffold_12:37165669-37207383 | 46 | scaffold_72:1526932-1571665 |
| 23 | scaffold_15:32528347-32556530 | 47 | scaffold_391:3899-38366 |
| 24 | scaffold_16:10909381-10994770 | | |

[0058] A target site for inserting an exogenous nucleic acid molecule can be located anywhere within or near (e.g., within 500 kb or within 100 kb upstream or downstream) the super-enhancer region. In some embodiments, the target site is located within 400 kb, 300 kb, 200 kb, 100 kb, 50 kb or 20 kb upstream or downstream of the super-enhancer. In a particularly preferred embodiment, the integration of the exogenous nucleic acid molecule is within 50 to 100 kb upstream or downstream of the super-enhancer. In a particularly preferred embodiment, the target site for inserting an exogenous nucleic acid molecule is located within the super-enhancer region.

[0059] In a further preferred embodiment, the exogenous nucleic acid molecule integrates at two or more integration sites in the genome of the cell, provided that at least one of the integration site is located anywhere within or near (e.g., within 500 kb upstream or downstream) the super-enhancer region as described-above.

[0060] Further, preferably, the exogenous nucleic acid molecule integrates at two, three or more integration sites located anywhere within or near (e.g., within 100 kb upstream or downstream) the super-enhancer region as described above.

[0061] More preferably, the exogenous nucleic acid molecule integrates at two, three or more integration sites located within the super-enhancer region as described above.

[0062] It has surprisingly been found in the present invention that these super-enhancer regions in the CHO genome can be used to produce an engineered CHO cell that highly expresses one or more exogenous nucleic acid molecules inserted within the genome of the engineered cell at the above-described target-sites within or near these super-enhancers.

[0063] Thus, in a further aspect, the present invention provides an engineered CHO cell produced by the method described above.

[0064] The engineered cell exhibits a higher (e.g., one or more folds) expression level of the exogenous nucleic acid molecule as compared to a control cell. A “control cell” can be a cell containing the same nucleic acid molecule inserted at a different site by random integration. For example, a control cell can be generated by randomly integrating the nucleic acid molecule into the genome of a CHO host cell. The CHO Consortium has also identified various potential genomic sites. A control cell can be produced by specifically inserting the nucleic acid molecule into one of these sites (Sofie A. O’Brien et al., Biotechnol. J. 2018, 13, 1800226, DOI: 10.1002/biot.201800226). The expression level can be measured at the mRNA level or protein level. As the engineered cell according to the invention or a control cell can contain more than one copy of the inserted nucleic acid molecule, the comparison can be normalized by determining the expression level per copy, such as comparing clones with single-copy integration.

[0065] Whether a target site within or near one of the super-enhancer enhances expression of the nucleic acid molecule can be determined by a skilled practitioner in the art. The precise location of the target site within or near the super-enhancer is not critical as long as the site can enhance expression and permit stable integration of a nucleic acid molecule. The site selection also depends on the genome editing technique used to insert the gene.

[0066] Hence, in a further aspect, the present invention is directed to the use of a super-enhancer as described herein and being at least 90% identical to a sequence selected from any one of SEQ ID NOs: 1-47 for transgene expression.

[0067] Further, as the super-enhancers can exert an expression-enhancing effect whether they are at their native genomic loci or at different loci, they can be included in expression vectors for transient expression of genes. For example, an expression vector can contain a gene and one or more of the super-enhancers as described herein. If more than one super-enhancer is included, they can be arranged in tandem with or without spacers between them. The vector can be introduced into a CHO cell to stably or transiently express the gene.

[0068] The engineered CHO cell described herein can be used in various commercial and experimental applications. In particular, the CHO cell can be employed for producing therapeutic polypeptides or proteins, such as antibodies, for example immunoglobulins or parts and fragments thereof.

[0069] Therefore, in another aspect the present invention provides a method of producing a recombinant polypeptide, the method comprising:
[0070] (i) introducing into a CHO cell a construct for integration of an exogenous nucleic acid molecule into or within 500 kb upstream or downstream of an expression-enhancing sequence in the genome of the cell, the expression-enhancing sequence being at least 90% identical to a sequence selected from any one of SEQ ID NOs: 1-47, to produce an engineered cell,
[0071] (ii) culturing the engineered cell to recombinantly express the exogenous nucleic acid to produce a recombinant polypeptide encoded by the exogenous nucleic acid, and
[0072] (iii) isolating the recombinant polypeptide.

[0073] Step (i) of the method is as described above with respect to the method of producing an engineered Chinese Hamster Ovary (CHO) cell according to the first aspect of the present invention.

[0074] Culturing the engineered cell to recombinantly express the exogenous nucleic acid to produce a recombinant polypeptide encoded by the exogenous nucleic acid in step (ii) and isolating the recombinant polypeptide in step (iii) can be performed by the skilled practitioner according to protocols well-established in the art.

### EXAMPLES

### Example 1: Identification of Super-Enhancers Within the CHO Genome

[0075] Super-enhancers in the CHO genome were identified by applying ATAC-seq (Assay for Transposase Accessible Chromatin with high-throughput sequencing) approach on CHO cells by using a method as described in: JD Buenrostro et al., Nature Methods, Vol. 10(12), December 2013, 1213-1218. By this approach, open-chromatin regions throughout the CHO genome were identified, representing active regulatory regions. Regions were further analysed according to the protocol used for identification of super-enhancers from ChIP-seq data (JD Buenrostro et al. Curr Protoc Mol Biol., Vol. 109, 21.29.1-21.29.9.). A total of 47 active regulatory regions were identified genome-wide, representing putative super-enhancers (Table 1).

[0076] ATAC-seq was performed on three different parental CHO cell lines at day 3 and day 7 of the bioprocess, respectively, following the protocol described in Buenrostro et al. (2015) with minor adaptations as follows.

[0077] Cells were cultivated in shake flasks 250 ml at 36.5° C., 10 % CO₂ with shaking at 150 rpm (R=25 mm). To prepare nuclei, 4e5 cells were spun at 500 g for 5 min and washed with cold PBS. Cells were lysed using cold lysis buffer and immediately followed by transposition reaction as described in Buenrostro et al. protocol. The transposition reaction was carried out for 30 min at 37° C. and purified using a Qiagen MinElute Kit. Following purification, DNA was amplified using 1x NEBnext PCR master mix and 1.25 µM of custom Nextera PCR primers Ad1_noMx and Ad1_2 (sequences are shown in Table 2), using the same PCR parameters as described in Buenrostro et al. protocol.

TABLE 2

Primer sequences

| | | |
|---|---|---|
| | Primer | Sequence |
| SEQ ID NO. 48 | Ad1_noMx | AATGATACGG CGACCACCGA GATCTACACT CGTCGGCAGC GTCAGATGTG |
| SEQ ID NO. 49 | Ad1_2 | CAAGCAGAAG ACGGCATACG AGATTCGCCT TAGTCTCGTG GGCTCGGAGA TGT |

[0078] To reduce GC and size bias we monitored the PCR reaction using qPCR in order to stop amplification before saturation as advised from Buenrostro et al. Libraries were amplified for a total of 8-10 cycles.

[0079] In order to remove primer dimers and large > 1000 bp fragments, purification process was modified. Double-sided bead purification with AMPure XP magnetic beads was used instead of MinElute Kit. The quality of purified libraries was assessed with Bioanalyzer High Sensitivity DNA Analysis kit. Library quantitation was done with Qubit.

[0080] Paired-end sequencing was carried out on MiSeq (Illumina) with MiSeq reagent kit v2 (50 cycles) and data analysed using Array studio (Omicsoft) software. Reads were mapped to the reference genome CHOK1S_HZDv1 and peaks called using MACS algorithm with added criteria “Exclude multi-reads”. The peaks were ranked based on peak score (Fold enrichment), clustered and intersected to identify super-enhancers. The ROSE (ranking of super-enhancer) algorithm is applied to successfully differentiate super-enhancers from typical enhancers and other regulatory regions.

[0081] In total, 47 super-enhancers were identified in majority of samples (i.e. 3 cell lines and 2 time-points of the bioprocess) and are listed in Table 1. Regions that are listed in Table 1 represent open and active regions in CHO genome that remained stably active during bioprocess and are common among parental CHO cell lines.

[0082] To confirm that the identified regions are super enhancers, massively parallel RNA-sequencing was carried out for two CHO derivative cell lines following standard RNA-seq procedures and expression levels for the following three groups of genes were extracted from available transcriptome data: 1) 40 genes within 100kb proximity to several identified super-enhancers; 2) 37 genes within 100kb proximity to identified typical regulatory regions (e.g. enhancers or promoters); and 3) 40 randomly selected genes. Average expression levels from the two in-house CHO cell lines were compared and results are presented in FIG. 1.

[0083] Expression levels of genes found in 100kb proximity to super-enhancer regions were shown to be on average 7-fold higher, when compared to randomly selected genes.

[0084] In addition, super-enhancers are clusters of enhancers. To confirm this, the identified super enhancer regions were compared with publicly available data where Feichtinger et al. (Biotechnol Bioeng. 2016; 113(10); 2241-53) performed ChIP-seq experiment on CHO cells in order to define chromatin states, including promotors, enhancers, TSS, etc. Most of the regions identified overlapped with regions defined as enhancers by ChIP seq data, therefore further supporting the finding that these regions are super-enhancers.

### Example 2: Transgene Expression Under the Control of Super Enhancers in the CHO Cells

[0085] To further confirm the functionality of SE regions for increased expression of transgenes, the transgene sequences coding for human IgG4 and IgG1, were integrated into the target SE regions, and in the 50-100 kb proximity to the target SE regions, respectively. Three candidate SE regions were targeted including scaffold 12:37165669-37207383, scaffold_72:1526932-1571665 and scaffold _54:2219944-2303066. One region per clone was targeted. Productivity and mRNA levels were assessed and compared to stable cell lines generated by random integration of the same transgene sequence.

[0086] The position of the integration sites for IgG1 experiment are (near SE regions):
[0087] scaffold _72:1135489-1135490
[0088] scaffold_146:93341-93342 (159090 bp away from SE region scaffold_72:1526932-1571665)
[0089] scaffold _12:3723885-373886

[0090] The position of the integration sites for IgG4 experiment are (within SE):
[0091] scaffold_12:32605600-32605601 (referred to as 12-8 site)
[0092] scaffold_12:32582184-32582185 (referred to as 12-10 site)
[0093] scaffold_54:2259987-2259988 (referred to as 54-8 site)
[0094] scaffold _72:1556270-1556271 (referred to as 72-5 site).

[0095] The procedure used to prepare stable cell lines is briefly described. First, cells were co-transfected with: 1) expression vector encoding for Cas9 nuclease and puromycin resistance gene (vector referred herein as Cas9 vector); 2) SwaI linearized expression vector encoding for heavy and light chain genes of an mAb molecule, as well as neomycin resistance gene (expression vector referred herein as mAb transgene); and 3) relevant PCR amplicon encoding for sgRNA (targeting a single genomic site for targeted integration) under U6 promoter, in molar ratios 1:1:6. Cell were incubated under standard conditions (36.5° C., 10 % CO2). Two days after transfections, cells were subjected to a three-step selection pressure consecutively using puromycin (5 µg/mL), geneticin (0.8 mg/mL) and methotrexate (500 nM). Next, recovered stable cell pools were single-cell cloned using Cytena cell printer resulting in generation of stable monoclonal cell lines. The presence of targeted integration event was assessed in all generated stable cell lines using qPCR. Briefly, gDNA was extracted using KAPA Express Extract kit and four qPCR reactions per clone were performed targeting all four possible junction sites between CHO genome and integrated mAb transgene sequence (i.e. considering sense and anti-sense vector orientation and two junction sites per each vector orientation). PCR products exhibiting a single peak by the qPCR melting curve analysis suggested the presence of targeted integration event. Putative targeted integration events were further confirmed with amplicon-seq using illumina next generation sequencing platform (MiSeq).

[0096] Random integration clones (as a negative control) were generated by co-transfection with Cas9 vectors and SwaI linearized mAb transgene in molar ratio 1:1. The three step selection pressure and generation of monoclonal cell lines with random transgene integration were carried out following the same procedure as described above.

[0097] Volumetric and specific productivities of generated cell lines (targeted integration vs random integration) were analysed in batch and/or fed-batch processes. Titer determination was performed at days 4 and/or 14. Antibody titers in the cell culture supernatant were determined by Bio-Layer Interferometry technology using Octet system. mRNA levels of light and/or heavy chain genes were assessed at day 7 of the fed-batch process using droplet digital PCR (Bio-Rad).

[0098] Results are summarized in Tables 3 to 5 below and shown in FIGS. 2-11.

TABLE 3

Targeted vs random integration summary (all relevant clones considered)

| | IgG1 | | | IgG4 | | |
|---|---|---|---|---|---|---|
| | Targeted integration (average±std) | Random integration (average±std) | Fold difference (p-value) | Targeted integration (average±std) | Random integration (average±std) | Fold difference (p-value) |
| N | 34 | 35 | | 34 | 32 | |
| Titer -simple batch | 895±249 | 777±350 | 1.2 (0.1120) | NA | NA | |
| Titer - fed-batch | 2542±615 | 2320±983 | 1.1 (0.2635) | 2361±840 | 1586±825 | 1.5 (0.0004*) |
| LC mRNA levels | 41.2±20.9 | 24.1±12.3 | 1.7 (0.0001*) | NA | NA | |
| HC mRNA levels | 23.2±11.9 | 17.6±9.4 | 1.3 (0.0325) | 3.7±2.2 | 2.6±2.1 | 1.4 (0.041) |
| Qp (day4) specific productivity | 18.7±7.6 | 12.6±7.0 | 1.5 (0.0009*) | 11.0±5.1 | 7.0±4.9 | 1.6 (0.0015*) |

LC: low copy; HC: high copy; Qp, specific productivity - productivity per cell per day; bold, statistical significance
*significant after multi-testing correction

TABLE 4

Targeted vs random integration summary (only clones with single-copy vector were considered)

| | IgG1 | | | IgG4 | | |
|---|---|---|---|---|---|---|
| | Targeted integration (average±std) | Random integration (average±std) | Fold difference (p-value) | Targeted integration (average±std) | Random integration (average±std) | Fold difference (p-value) |
| N | 12 | 11 | | 21 | 27 | |
| Titer -simple batch | 830±250 | 571±296 | 1.5 (0.0353) | NA | NA | |
| Titer - fed-batch | 2292±413 | 1811±1010 | 1.3 (0.1651) | 1987±647 | 1569±825 | 1.3 (0.0627) |
| LC mRNA levels | 34.5±20.3 | 16.9±2.6 | 2.0 (0.0093) | NA | NA | |
| HC mRNA levels | 17.1±9.5 | 10.5±6.8 | 1.6 (0.0681) | 3.8±2.9 | 2.5±2.1 | 1.5 (0.0874) |
| Qp (day4) specific productivity | 15.1±7.4 | 7.7±5.0 | 2.0 (0.0108) | 8.8±4.4 | 6.2±4.1 | 1.4 (0.0388) |

TABLE 5

Comparison between separate targeted regions and random integration (only clones with single-copy vector were considered)
IgG4

| Region* | 12-10 (average±std) | 12-8 (average±std) | 54-8 (average±std) | 72-5 (average±std) | Random (average±std) |
|---|---|---|---|---|---|
| N | 6 | 2 | 6 | 7 | 27 |
| Titer - fed-batch | 2107±383 | 2864±336 | 2120±553 | 1520±676 | 1569±825 |
| HC mRNA levels | 3.2±2.6 | 6.3±1.1 | 2.9±0.7 | 4.3±4.2 | 2.5±2.1 |
| Qp (day4) specific productivity | 8.0±3.7 | 14.8±0.0 | 8.2±2.1 | 8.3±2.1 | 6.2±4.1 |

*12-10 and 12-8 represent different parts of the scaffold_12:32514411-32671314 region; 54-8 represent scaffold_54:2219944-2303066; and 72-5 represent scaffold _72:1526932-1571665.

[0099] As evident from Table 3 and FIGS. 2, 3 and 9, mRNA levels in targeted integration clones were on average 1.7-, 1.3- and 1.4-fold higher for IgG1 LC, IgG1 HC and IgG4 HC, respectively, when compared to random integration clones. For IgG4, volumetric productivity in fed-batch process was significantly higher in targeted integration clones compared to random integration clones (Table 3 and FIG. 10).

[0100] Since overall productivity of a cell line depends not only on mRNA expression levels of the transgene but — among other things — also on growth performance (incl. growth rate, maximum cell density, viability, etc), the productivity per cell per day (specific productivity; Qp) was assessed for every clone on day 4 of the process. Specific productivities of targeted int. clones were significantly higher compared to random integration clones. The increase in specific productivity was 1.5-fold on average for IgG1 and 1.6-fold on average for IgG4 targeted integration clones (Table 3; FIGS. 8 and 11).

[0101] Next, the transgene copy numbers per cell were also assessed for each clone. Targeted integration resulted in higher number of integrated transgene copies compared to random approach. Table 4 provides an analysis and comparison of the clones with single-copy integration. Still, specific productivity remained significantly higher in targeted integration clones versus random integration. Most measurements were 1.5-2 fold higher in targeted clones vs random clones.

[0102] Further assessed is the productivity and mRNA levels for each targeted region individually (see Table 5). Average specific productivity was increased in all target regions when compared to random integration, respectively.

The application's sequence listing, which the Patent Office published only in electronic form, follows.

SEQUENCE LISTING (49 sequences)

SEQ ID NO: 1 - DNA, 40777 bp, Cricetulus griseus
  >scaffold_0 dna:scaffold scaffold:CHOK1GS_HDv1:scaffold_0:127003236:127044012:1
  misc_feature 31850..31879: /note="n is unknown"
cttaagtactggctgtgttaatttttcttaaaaaaaaaaaaaaaactggaaaatttccattatttccattttgtaggtctcagtgactccctctggctcctaatctgtattctggcatgcactaacctctaccacctccataataccactaatagaagaagaaaaaaaatcaaaatgcaaaagagcaactctggcttctaggagggagcccagatgtcactataaccagtcacccgtcccccaataagatgtggccacactgtatccgcataaaacccacagtgagacatgaacagccagcctcctttacaaccaagagggtcacctgacagtgagcaaaggactgtcactgtggagaggatgactcactgagcagggaaaagaacgactcaccaagcaggaggctgagtggaggacaacaggacgggaaggcgaggaggaggtccagcaggcagacgctggcatctcggatgaagcggttgtaatcagctgccccctgtttactgcatagctcttgcagcctccgcttttcagcagtgctgctggcacaatccaccagggcacgcaaaaatgcctgagggaagaagccagctatgagcggctctgtggttaggttagcactgtgagttccaggccagccagttacatggtgagaccttgttccgaataaataagtaaacaaataaacaaatgaacaaataaataaaatatctaagaaatggaagcgagaacaagctaaaacagcagaaaccactgcaaggttttaaagtacatattaatcacttaaaataccaattttactgtaaaaaaattattttacacaaatgtttcaaacacaggagcaaagattatcacagtatagaaatttctatttaaacatttttcccccatggaaaatctacaaacaggccacacgttcgtgatcaaaccaacaatttgatgtagccattaaaaacaccctcagtctttctgcaccagaaaacacagacttaatgtcttgctgtggagtaggaattagattccagaattaaactatgggtttaaaacttttgacttcctatgtcacacccatacagatattttaatacagcatattttatatagtaaaggaaatatatttacatattttgtaaaatttaaaaagctggtaaagttaaaacaaaactgaattatttaaacttaagctctattaaaatgagtactgtgtctaagactcagcctttttctaaagtggtctgctcccctagaccagcagtgcctacataacgcaagatagaagcctgtttttaattaccagtctgtctgttcagacaatttaagtccaacacagcaatttagagaagaaatgcaaagaaatgtttagaggaaaaaaaaagcaaacccagctgcaagcatcttgatgtaatcctgacctctagtggctcagtctatttcaaaatccctctaaacatcaatggaagctgccaaacccccataaaataaccaagctgtactacacagaagatctgcatcaatatagtaggctatgaagagggggtgagagccccacacaccctaagaagtgtcctgtcatgaggaggagaagaggggcactgtgcagcctgactgccaggctgctgcctgtcacattgtaacactaatgtcaagtgaatgcgactgcaggagacctgttttcaaaacatcaggaatacaactgaactcctgttttttacagctccaaggggcaggcatcaggcttatctaagagtcttacacagagttactcccagaagacagagaaatacctttttaggaactgcccgtatttccagacaccaggtgaggaggaactggagagaacagccctcgggcacatgctggggcacagcagctccttgcaggtgaggcaggaagagtcaggccagagagaagacaaccacaaacacatgtttagaatatgttctgtattcaccacagtacagctagctgagatactttatagtgctaccaagtgtgatgacttgtggcaatgttcaagcagcaactggagaaataaatatgccaggaaaaaaaccagccacttcacaaaagtaaaagaatgataaattcaaaatgtaccaaataaaaaaaaaaagaaaattatctaaacaaaatagataagatgaccaagttccactaaaattaaaagtaacttcaggccgggtggtggtggcgcatgcctttaatcccagcactagggaggcagatctctgtaagtttgagaccagcctggtctacaagagctagttccaggacagtctccaaagccacagagaaaccctgtctcaaaaacgccgccaccccaaaataaaaacaccatcttaaaaaaaaaaaaaaaaagtaacttcagtggctagagagacagctcactaagtgtgacagttagctgttctagaggatcccagttcggttcccagcaccctcacacctgtaactcttttctggtctcaactaggcaccaggacaatgtggtacacacacacacacacacacacacacacacacacacacacaccagacacaaaaacaaaaatacctctttttgaaaaacaggaagtttaggactgagtaagtcaagattatatacaattaatattaatattttaaataaaacagcttctatttacagaaaattgtttacataatattactatgagaagtaaacataaatgggaattttacataaaggctctaggctcctttcatgcccactagtgtccattaccatactactcactttaaataagaataacatcaagaactggttagcaccagatttgcttgtggttatgtatgtgcatgcatgtttggtcaaatccagcacctgtcctacctttcttcttagtgtccgtcttaattctcacgatgacatggtatgcttgtttatcagccagctgtagcctttgaagcaggttttctacctcagagtcactgtttggacagatcacattgaaggaatctccaggctgatgagaaaactcgattttctagagaaggaccaaggtgaaattgagaagtccattcaacaaacacactttcattaagagttactctagaaaagaccaaggggcagtgtgctggtacatgccactgataccatcactggggagccagacattggcaaatttcttgaattcagaggccagcctggtcttccgagtatgacatcacattagagaacaaaacaaaaagaaactatgcaaggagggtagaaagctctagccagttgaggttacaaagttcagattcccagaatccacataaatactggctggtttgggtgtgtgtccacctgtaaatccagccttgaaaggtggagacagggtatgcacaccccacagcccacaaccggccatactggagagctctgggtttgactgagagatgctgcatcagtgaatgagacggagagtattcccggaaaattcctaacattacctcccagccttcctatgtgtgtgtgcatgaacgacacacacagtgcacttaatagacacatgaagtttctcactagtacagacacaaaatagtaggtctactgtttctgtcaggaagttctactgaatgttcacagacaacctgaagtgttctgattttcttgggacattcttcaaaataaaggttgattaatgactatagcgtatctcagaggaacagatagatgcagacggattcatagacagggttcaaataaccacgtacagccccctggtacaacaggcaaatgctctctattatcacctctctggagagcttcccaaaacttttcagagtctccaaagaataggaagtactgctctgagaagctggggctctcctgaccatctactctgaactttaattcccctcactggctggtcttaagtgagcacttccttctgctggccatctggaccccattgttctctcatggcttatgatcaaggtgctatgctctgcacggtcagcatcagttctcacatcttctccgaagctgaaaggaaagaggctcagggaaaatgataggtcaggaataaaggccagatgtcctgccagagacatctcctcccggatgtagtaactgagtacccaaaggttctctgtatcttcatgatacaagaacaaactccgaaacaacttactgaaatgtccaattccaacagcagtgtggtctttatggcatcatttgtagtcagctgaacagcttttgaaattggaacttgaaaaactggatccactgaagtcacagatgtttggctttcctccttgagaaacaaatgaaatataataaactgcaacccccagaaccacattaaaaagtccaggctcggtggcatgcaattgtcatcccagcactgaagaagccaagacaggcagagtcctggggctagcaggtgggcagctaagcctactggtgagtaggcccgatggaggaagggtattctcagttttagttgtttcagaggtatctgtcaccaggggtccaataaggatagcacaggtcttaggaaactgcacagaaacttaattctttgtgatatctcccagttcctcttctaacttgattttattttatttaagaatagaaaacattttaacaaatcaaagccaactaactggccatatgggaaggctgaggcaagtcaaagctggatgctggagccctggtggggggactctggaatgtgaccctcaaaagacctgccaccagctccagctcagccctcagccagctctgtaggaagccctcagcattaagaggtcgcccttactcagccacctctcctttcaatgcaggccaaatccaaggactatgatggccataaaccctgcctgcgtcccgattccagataaccattaagaactggaccatttcaccgagaaccccacaggaggctgggacctcagctgagaatgcgccacagcttagactcttagacacattgtgtgtaatcctgctattacccctccagccccacactgccgtaaagaatatttcacagtctgacacttggaaccagtgacatttagtgctagagcagtctaaacaggctgctaacacgggattctggagctggacaccatgtgggtgacgagaaggaaggcagaggtgtggcacagaccacaatgtaaatgcagagtgggggagtccaacagtcaaggctgggggagtctggacaagatgggatgctgaggttctgaatggagggtggggctacataaactcagagcacctgagaatgatgtgagcaagctggggtctcagcaactgaaagtgaaggcagagcgagagtggcgccatgaaaggcttcgtcaaagaagtaaaaaaggaattctgcaacatcaagccacttgtaacacggagttgacgtagcttttctggaaggctcagacagtaagtgctttcttctttgcaggcctctggtgtgcattaaccacaaaagcatctgtagacactgcacagcacaacaggcatggctgctgcaggaaccgtagttacagcaggagatgctgcacctggtcctcaagtctcagacatgtgtcctaatgtgacaaacagttaacggataatgccgttaatgaagtaaatctctcacctggccaagaggctcctcaagatggacctccaaatattctggcggcaaagtgggaatacttagagaggtgtgtgagagtgggggaactgagcggacgagcgaggactcaaagtcttcaatcaaatctctcctctgactcctgttagcttcattgtgctcccacacctcagaatccttctctcccacatcctctaatcgcagaagttcaacttgtgactggatgtgtagcaactccggcttcacaggagtgttcaagggggcatctgatggcggtgggagtgtgtcactcattccatcttgtcctctgagcgacttaaagtgttttgtgagggcggcccagagtccagcaatccacggctctacaacgagctctaaactggtatgtaataaaaggggaaaaaaccaaatgtctaagttgtccatttgagcacaacaatgaaaaagcagcattcggtccattcggcagtgtactatatgcgactgtagatgtaccaaatcgactatttcaaaaaaatataaataattttcatggtgttggttagcactgtacaactgaatatgcaaacagagcaaatgagctgagatatgaagctactttgccccgataatggggcattgatgctcggcctgcaggctccttccactagaggagatgctaacagggcccctgtgtgcaggcagagagaagacacgcaggcaataccaatgttgcagaagcagcactcacttacaaacacacccatgctctgagatgcatgtaacagtgctgggtgcttccctctttccattaacagatggtggaggtggggatgtgggacatgacaacacaggccaaccaggctccactcatctgaccttcctgggttctggctaaatggtgaaagtataatgagactcagatgactggcagtactaaaccaagccaaacatttttcataagctcaccaacttccaccatgtgtatgagtttactgaaaacagacatgcactgcccttaccctacacagtcgtccgcatgtccagtgtcgtagaagtgctgggctccgagctcctggagtcgtttatcaattactttccctccattgcagaagtatgtgtattctgagtcacccaaacctgagaacccaaaaagacacttggtgtctacaaaggctcaaagaagtaacagatgcagaaataatatgtctaaacactatcccatactccttacacatacaacaagaaataatgcatggatccacatttacttatttttttcagcgatgctaagtatgcacatcctgaaaggtccagacagtaacaaaacagatactggctactggtcagagaaatatacatgcctaacattgccgtttccagtagtcactgaaacaggtcaagctggctttgaaagtgctaactgtactttacactctctcaactctgaacaccacggccaaggaccattctgatcctcaccataacctctttaagttatgctttacgaagccctaggccagccgggtgttggtgggggaggcagaggcaggcagatctctgtgagttcgaggccagcctggtctccagagcgagtgccaggataggctccaaagctacacagagaaaccctgtctcgaaaaaccaaaatcaaaaccaaaacaaacaaacaaacaaacaaacaagaacaacaaagccctaggccattttcttagcatgtgatgggtgtgaccatcagcaaagagctattactaaccatggaagagtcccacctctgagtatcagtcactgctagcaggccaaatataaaggaattattaagaatccctggctggttccaatgtccctagaaaaccacaatgctgaagttatgttctcagggaacatgactgggctttaccttaaacaattaaataacctaagagcttattcatgcaagaatggtgtttcagtaggtttggagtgaggcctagacaccaatccagtgagaatattctatggctactgaaggggttctacagagtggtgggagcatagctgagaggtaaagtgcttccctagagtctaagatacatacaggatggggggaggagaggaccagggcaccgcttttgagtatagactagacaatccttgatatttctgtattttatatagatccaatatttaatgtaaaaaaagacacatgcaactatatttcatgattttgaaatatatattcctatgtcaaagcaataactgcatacattaaaaacctaatacagtccattacccaataatccatatcgcaggtgagcaaagaagtctgttggtaatgtcttgtcgtgtatttctttaacaaacttgagggctgtgtcaggcggatctccagtccccgtggtggacacaaccattactagaggagcagattcagttttcagatcatactacaaaacaaggagatcaaatcaggacgcaggactgcatggatctgtgatttaacacagcagcaagagtaagacaaagcaatcagccaggttcctgtcttgcgcacttccttttaacacagaagcaaaggacactgcttttttagttcacctttgctgatgttcaccaggaagctgggagagtttaacacatctctcttccatgtgcttcactaagaaaacgtctggggtctcccccaccccctccactgaattctttttttttttttttggttttcgagacagggtttccttgtggctttggaggctgtcttgcctcctgagtgctgggattaaaggcgtatgccaccaacgcccagcgccacttaattctttagttaggaaaacatgagaacaaacaggcttaccaaaagtgtcaggaggacaggcaagaagcaaggcaggaaaatcagtaggagaaggaaaaacaaaatctatatatataatctatatgtatctctatatacacacacacacacacaatataaaaagagcaaaggggttttatagggtcaaggtgagacagaaacaaagacaacagacatcacgtaccaggattaagacagaacagggacaggcatggtggcgaacgcctttagtcccattgcttaggcggcagaggcaggtggctctctataaattcaaggccagtcttggtgacctccaggtcagccaatgctgcacagtgagcccctacctcaacaaacaaacatttaaaaaaatgcacaagacaggagcaacacccagtgaagacagactgaggtgcaggtggcaactctggaatcttcatcaaatctgaacagtcatgtgtatgacaattgaagcagaggcaatggcaaacaggtgaacagagggttattttaaaggggaaaattgagtgttgcccctcagtatcagctgcctgtcataaccaactcctcattctcttcatgtttggaaggaaatggatccagtccatgctcttaattcttgctaaatttctttctcaactgctcatgaacatggcccagtttaggttcaaagaattcactgcccattttttgagatggggtcgtcttgggctgactttaaaatcattatgcatccaaggttggttttgaacttctgatcctcctgcctccatgtcccaaacacccagactataggtgaatgtcactatacccagattatatgtaggctttatgcatgctgagcaagcattctcctaactcaactacacccccaaccctattttactttttttgtggttcacgatataacgcagagcctaccagagctacaaccagtcttcactttcttttccatgcctatggataaggatttgggttaactttccaccaggctgttaaatgtttacaaagtaatctgaacaggactactatgaggtaggcaatagacggctaccctttcaacttagatcacgctcaactgagaaaccgctcagctgggggaacaaccagccaggttcccgtggccccaaaagaaaaaccaccactcaccttcccaccaaacggatgctgacccaactatggagagatcaactgtaaggcccaattggggctggttttatgccaacacctgcctgttattacagactcagggtaccatccagcatgggcatggtggcatgtttactttgagctgatgaatgacagggctctctgactggtggtgactttggaaggtcatctacaactatgttggtaaaggcacatcaaagggggtgtctcctttgaccagcataagtcataattcaccatgctgtgcctggtctagccttctgaaactgtggtttgtgaaaggccaggggagactgaactagagggagagggcactgttgacacagcttctgaggtactgaagggaatcggagggctaggagccagcataagtatatatatctgtctaacgtcttttcatgtgaactactgtgaacaatgcattctgagaacagggcacagaatggtcaagtgcctatcaactctggctaatgcagggacttttcagagaaatcgtgactacacagactaggagtccttgccttaagaagtgcccgaagccacttctgtaaattccagttcatcgaggaagcaccatggcctttcatttggaggaactctacaatgaatggcaaagtggttttagggcatccaaaggggctctgagtttataaagtggaaaaacacagatatgcaaaaagacatataaaaccaaaaatgtcccatttatcctcacgggcactcgagataaatgaatcatataccactattaccatttacaggtaggtagtatctgtctgtttcagtttctaagattttttttaacctaattaaaatgtatatacttctataatcgcaactagttggcaggatgtcgccaagttcaagttttacctgggctacagtgtgagttcaaggctggtttgggtgagtcccagtaacaaaaaagctgagaggggtgggtatagagcttactttcacaagcaaccacttcatagcacaaagaacaggaaaacccacggaacagttgcccttaccttttccgactcactgacacagtgaagatctgcagaaaacccatgggttgcagcctgctcacttatttcttctgctatggcctttgcctgtcctcgctgagtagcatacagtaacaaaaaccttctcatcacctcgggtcatgggctgtaactctaacagcgggactgaaaaaccacaaaggggaaaaggggatgctgtttagtgaagcaggccacccacaagtattaattcacagcaaatatatactcttgtttcttttcttttttttcgttttttttttcgagacagggtttctctgtgtagctttggagcctaccctggcactctctctctgaagaccaggctggcctcaaactcacagagatccgcctacctctgcctcccgagtgctgggattaaaggcgtgcaccaccaacgccttaacaagtgtaagcacttgtttcttagcgctcatattaaatgacccgcagtgtgagggaattacagcaggaggcatacagaagtaagactctcactgctcgggaaatccactcccgatttccagccacgtttggctcttgcaaatgtctatcagaggtgcgcagttgtaggaagagtgagctgaccctcacttcttctcatttgtatttgggattaggatcgtaaacccctcgtgactaagaatgacaacaaggcctgatcgaggagggctcaaacacagtgtcacctacaaaggtctttctgtttcttccctttttaaaaaccttaactgtacaacgctcccctcctccaaactgggggtaattctgtttgctgcgggatccggatcaaagtactggctgtcctgttggagctcccaccgttacacaagtcagtagtgagtgtacacggacttgcacatgggggcggagatgaccaggaataagattaaaaacagagagggcgccgggaccctacgcgcccgcactctgtctggtggctttctgtgggaaagctgacttggggtgggcgagccgactgcatgcatgctctagcggcgagccgggacacataaacaggctcgtttcgaaacagtgctaaggacctgactggagctgggacgcagagtcccagccggggcaaacggggaggtggggagggctcgcaatgctcgcaacgccacacgtgcggggctcgcgaataagtcttccctcccctcagcaccctgtcagctcccccgcggatccggagacccagagacgtcacccccctccccgagggtccccgccacccgcgggccacctacctccagccgcgaactcccgcgcgggacgccgtttgcctgggcgagcttccgcctgcaaactctgcacatgcgcgcagcctcctctagcgccggcttctgacgcctcaccaatcggaaggccggcgggacctgaggccagccaatcgctgggcgccggatgtgggcggtgcctgagcgcggtgcgtgcgtcggcatgtcccgccggtgagagacggtgtcggtgagcggacggaccttcccggggctcggaagctccgcgcctgtctagccgcgcggctaggatccgctcggtgagttccgtgccgggtcgggggttgggtcccccggctcttctgtcgggattggcgctcgcccacccccccgctcgctggcccgcagtctcccactcgagctcccgcatgcttcgtgggctccggcctctgctgtttgccctgcctgcgccgaatggcttttctgggatggttttctttccacctgtgaggcaaaattcaaatcccgggtaacagccgggctgttcttcccctctttaaataaaaagatttatatgtatgtatatgtgtatgtgtgcatgtatatatgcatatgtatatgtatctatgtatgtgtgtatatatgtatgtatatgtatgtgtgtgtgtgtgtatgtatgtatgtatgtatgtatgtatgtatgtatgtatgtatgtatatgtatgtacatacacacatacataccatagagcttgggccttgaagaggcagctggagaagggcatgctactagatgtagaacattaatcagagagatccttacgacacatatgacacaaggagtttagatttaaggccttgtgtgacactggctagaagggggtatgcaggcccttggcgggtagcctgcctagtgatggtgaaattgctgggtgtcagccgattagatatgaatggatgttgggaccaggagaaggaaggggtaaggggcttcccaggtcgactccatttcctgactcctaggaagagaaaccttgctgtttttttttttctttttctttaatatatattttatcgagggtcttgtgttttagtctttgtcctgggatactcattcttagttttgtcaacgttgatgttaagtcgcctttctcaatatatttgaccatggtgttttttattttgttctcatactaaggcgagttgtgaatctgatggcatggcgttaattaccctgcggagaaacttatgtcatatatctgatttttggatacctggatctgtggctgctttgaaaatttaccctgccgataatcacgtccggaagatagtcaaagatcgtctccgggtttggttctgttccctacaacccgagctgtttggggtcaggttccatcattcctactgtaaaaacttccactcagaaaatggcaatgatcttcacccagttgccgagctgtggttctctggagaacgtaagtggaacaggccggaacaaagtcttaagaatgaggatgaagagacaccttacaggagactaaacagctgcacctccccagaagaagtgttgagtttcataagtaccctggacactctgccagtttctgtggcatcagcagccttacacagggtttgtgaggtggggaaaggatatgacgagcaaaggctgccaaaaggaattttagaaaacagcatcttccaagctttatgctgtcagtgtgagcgggatccctcacatctgaccagtgctggcttggtgacagttttgcagtctctgcccgtggatcctccaagtaccttaatgctgagccttgtggcagaatgccagcgtcgtctccagggaggccgcttggaagcccaccatctttgtatgcttggggagagcctggttagacttcaaggttcaggctgtgaggcactggaactggttctttgtcaactgcagtgtgaaaatttgaaaacgtttgccccagaggacattgtggctgtttataggattctgcaggcatgtcctgaaaaagtggacaaacaccaggcatttctaaatgcagtcaacaactttaccctctcaatagttccctacctgagtcccaagtccgtgagccatgtgctcactgccttggtggctcttgaccagactcacgcccttccactggttataaaattgggcaagtccgttgtgagatacattcctcgttttactaacgaagagcttaggaaggtcttggaggcctttctgtattttggacacagtgacaggtttctcacggaggcgttagagcggcatgtagctgccctgtgcctctccctggaccccgatgtcatcagcactgtgatggagtactgcagtagaaagcggattctttctaagcccatcctcaatatggttgctgagacttttgtttgccagtcagaaaaattctcacctcgtcagattgctgaatcaatcgaaccgtttggaaaactgaattatttgccaccaaatgcccctgctttatttaggaagctggaaagtgtgctggtcgctcgtttccatcatttcccaccacagttgctactgaagcttcttcattcatgttcgctaattgaatgccacccggtcaactttatgtcaaaaatattcagccccttttttcttcaacggctgcaaggtcaaggtgaggtggttaaaaaattaactgttgtaacctgcgatgtacttgagtactgtttacattgactcataattctagggtcatcgaaaagcatgtaccttaggagtgaatgaattgttttatggtcataatccctcattttgcatgccaaaattcaaactcaaccatgtattttttttaggtaaagagtcatatttggacaaagtgagcctggcacaagtcacccagcttttcatgacctcagtcctagagtgcgctttctataaggtgagaagagagacaggtggtatggctttatttcctctggagatgcagatctgtgacttgagctggaatggtcccgtggtatggccttgtctttggaaaatgtccctttctgtattcttgtcttccctgctgtgtagttccttagatttcatcaaacattcgaggttcactactccatactccctggcaggctcttcatactccatgtagctgttgtgtggagtgtcagtctctggactgaacagacacggagttattcccaagagccttcttgagccaaacccaagattttgctgtagtttagctggagttcacctttcccacacagcactgtcctcgtaatgaacacaccttgtgtagagttggaaatgacatcctctggcctggctgcctcatcggcccctctctgctccatgcagctaagagtggctggttcaaagaatgatgtttatgaatagaaaccatgactccagtctttaaagttgcttgggttgctctaaagtctgtaaggataaaagttccctccacctcttctacccttgaaagagaagtgtgataagcagtttctctgcccaggtttaggtaaacaaatgtgtgcaccccatctgctttttttttccatttgaagtgatggggctgactaaaggacatgcggtttgtttttctgcatcctgcggccattcccaagtccgagatgcagagcttgagtcaaggttttgatttttatggcatttgctctgctagtccactctcaaagcatttcaggtttttttttgtttgtttgtttttagttttttttttgctggtttatctctgtcagcattgctataataaacatctttgaatgtctcatcatcctagagcctttctaaaaatcactgaacttaaaagtggggttctttaataaaatttggataaaggcagggtttccccctagcagggatacatgtcatctttatccaatggtaaatgaagatgacagctatgacttgcacatgccagcagcagtgctattagtcctttgaatccttgtcatttctctactgttctagaagggctttcatgtgtcagtaatggtgttgagtgtgtttccagatgtttagtgttcatttatgtttcctacaagttgtctctctacagctttaagaagtcaggatgagacaaattaacagttatgaatgttgtacgtgtttttttttctttaatttttattgttttttattgtatctactttttaaattatcttttttgtttgtttttgtttttttgagacagggtttctctttgttgcttaggagcctgtcctggaactcactttgtagaccaggctggccttgaacttacagagatccacctgcctctgcttcttaagtgccaggtctaaaggcctgtgccaccactgcctggctgaaaccctgtcttaaaaaacacacaaactaaaaccttatttgagtgtaacagtaagtctttactccaaccctctaagccctgccaccacctgggcgcttgctttctgccaggcctcctgagttccgcccaccaccatgttaaggtcccaagtaacacacagagacttgtattaggtacaaatgctgcttggccaatgactaggatttcttatatgctagctcagtcttaattatcatagatctatatatcttaattatcttatagaggatgccttctgttggcgccctctcttgctggctgattgcatggcgactccagagcagagaccaggaggaagagagaaggggtgacttcctttttgcccttgcttatatatgtctccctgctatgtcacttccttcctggatcaccacttctttactacatttcccagaatcctccttgactcctagtcccacctaacttgttgcctcattggccaaacagtactttattatttatcatccaataagacaaacacatacacagaagcacttcccccaacagtggagaatgattatgaccttgaagcaacttgtagcatttcaatgaagcttttaaagtggtgttcttgtgtgttttactcatttaaaagatatgagctatagcagtcttctgtgtattgtcatttttagaaaaaggtgtgcccatgtcctagaagcataccatgtatataaagtaattttgtatcccagtagccttcaattcacctctgctcttacatttgattttcctttcttgtgcttgtatgtatgaattttagggccccaagctccttcctcagtatcatgtgaagtcgttcctcacgccatgctgctccctggagacccctctggatctccatctttacaagtctgtggtgactggactgattgatcttctgggatcgagattgtattttgcatcaaaagtgttgacaccctattgttacaccataggtaagtagctcaggggtcttgtcttggtcagatcatcctgtccttgttgagccatacatgggacttaaatagccagaggtgtgagatgctggaggggagaaccttcccgaacctgaaggcaaggagaaggaagggttggcagagttgtgtagagccaggactctgagtttgagtttcacacattagccacatagaagaatgtcctggccaggggatcttaacctttttctgcttgatccctgatctggaaaatgagagaaggaacagtggcctctgatacatagttagtgctcagtgatgctcatagctgctgctgtgatttgggcctgggctgtgtgtgatacctttagtctgtgtagctatttaaataaatacaagttcctcatcacactgatgtgtcaggtgctcagtagacagacacggcttcccagatggtcacatagatggctctggcacagatcctcatctgctgcagttctgagtcggtgtcctctgccctcactgttctttcaggtggttgaataaaagaaaatcatcacataaagagacagttgtttatggacacatctcatgtctttctttcaccgggatgtttttacagaacggatgctactgtctgaaggggggtgggctgtgcgtatgcttacaacccacatgtcagggtgtagggtgctttgcttacatggaaagagagcagtaagcagaggtgaggtctgcgctgcctggtgtgagcttcactcaaaggggtttcttcactcggaattgaagggttcaggcccgtggttacatgaggaagaggaggatggatatggctcttggcatgctgtagactgcccagaacactgctctgtttcagagtaattgtgactgctgagttcaaagctggcttgcttggtctatagggctggttaagttactgttctcaccgttggttgtggccattgctttgcagcctcggccctccgataaaggcaatattgaagatgtgaaaccagctccgggaacgcaggaagataatgttgttgagggtattacacgaggaacttttccttttcttctttttgccagatgttgaaattaaattagacgaagatggatttgtattgccattcacagtggaggaggatgtccataaaaggtaaagaaagttgtgggtttaaagagttgacttagcaaactgatgcttttcttagggcagacatgaatgactctggaaatgaaaaccctgaacttcccaagactgaagcagccagcacagggcccacacaggtctgcgccaggtcctctgtgcccagtacagcttctaacttagggtttttatgacacttccaactgtgagaacaagtgcatctatgattcttttacctgctcttgggactcttttcctcctgttgggttgcagtgtccaacttggatatgacagtttttgctccatcttaacacactttattttgttgtgtctggttgttatctcttagaagcctgttcttttctaaggagaaacagaaagggagtggactggaggggagaaaaaggggaaatggggaggaactgagaggaatggagggaggggaaactataatcaggatacattgtgagaaaataattgttttcaataagaagaagtactgagcttaccatttttagaaaatcctttcctttggcaaacaataatagtattaaatgttttcccaggggactaaaggacaatctgtttatgattcatttaaaaacaatattgacacataagaatagacaaattcaaataatctctggcagctagacaaatactctacctgtttcctgagttacagttgcctttgctgtctctcagggtggcgctgtgcatcgatgggccacagcggttttgcgctgacactaagcacctgctgggaaaagaggccattaaacaaagacacctgcgcttgctgggctaccaggttgttcaggtatggcacctcttgaaaaaccagtctccatgccaggttggcttgttcagctatgtacgctgacacacagtaccactgtggagtgaacggcaaaccatgagtagagagacggaatcgggagcccccagatgagcgaggtggcaggggtgtggacagcatggtcccgccatgacagctgccctgtctatttgcagtcttgtccgtacgtccctagttatagttgtgcactgccagcttaagtgctgttctgtcagctcatgcacaggcaaaggccccagctgggtatggtttgcatctgcagtctaagcaagggcaggattcgtcccaagccctctctgtctctgctcgtggattttataggcccagcctccatcttaacttgctttaacagtaagtgggctgacactccagcagatgataaccatgttctgtctagtttatatcttaagtttacattacttgacctgcattttgtagttagaatttccaaagtggcacatacctatttccttatcactgtctagaattgctaagttcctggaatagcttttgcttcagtttctgtctgatttagtgggaaaatcaagaaaggtggttcagggccttcatctgtccttagtgtttacaacattatgttttcaatgggcactttgtaaggtccactggggattgcagtagacatggacacgcacgtccccattgcagtagacatgggcaaacacatcctcattgcagtagacatgggcaaacacgtccccattgcagtagacatgggcaaacatgtctccattgcagtagacatggacacgcacgtccccattgcagtagacatggacaagcatgtctccattgcagtagacatggacacgcatgtccccattgcagtagacatggacacacatgtccccattgcagtagacatggacacgcatgtctccattgcagtagacatgggcaaacatgtccccattgcaataaagtaaacatggacaggcatgtccccagttgtattaacaccactctggcttgctgtctggtgcttttccgtggtaccgtgctcagtcctgaattccttttctaaaagctagccatgcagtgtgtgctcagaaagtttcttcattgctttaacccaaaccagagacttctgtcttagcattcaggagcattcattttccagtctgcacacaggcgggcccttctgacacatggcctgctacctagcccgtgttcccaatgctggtccccaccccctccctccctattccctctttccccatccttctctgttctcttcccctgccccaccccctccactctccttatctcaagccctccatttttctccactttctccctctgcccttgctgtttctgtagccaggtctgtctctggcttttgtgaactccaatggttcatcggccctcagctcagtttcccttcttgtccctttgcagttaacacagacaccccacctccactccctacccccaccccgagactcaatcttgagtataatgagtagacttagctctcacatcctctctgctcccctctgccaccattgctctaggtgctgggaactcctccagggtcaggagtcaggtgtgacctgagtgagtgctccctctgctggaggagggggtcagacacagcagaggcacagcagagttgcttggtgtggcatgctttaatggtttcgtttcccctgacaggttccctatcatgagctggagttgcttacatcaagacttgaattggtggagtatttacaaaggaaactattttctcaaagctctcctgtccattggtaataaaggaaaccggctacaggattcaagagtgaaaaacgagacaaatgactctgctagtcagctactgtgtggaaatgcatttacagacttggggtctgaaaagggcctgtggctgttctataccgtgtataagtgtattggtggtaaattactatttatgtgtgcattagtgggaaatttaaaaacctaatggcgatgtcataggtgccttgactgaatcaagcagggtcattcaaacgcaataaagccatgtaatgagaaacagttaattgcatgtcttgttattaggagttgtctgccaataaagccatgctcttagaggtgtttgggtcaggaagacattttatctttcacttcccttattggtgggagtgatacttggtaagaaggatgggagtgagaaatcagagctgtttaggttgggtttgggggactcccagagggagtgagaaagagttacattgttctgtacatcggtggtcctgctttgtcccggtttttgcagattcagaggacacatgtgggaggcatctagaaacttgggttccaccacagcaagtctgtggccttacacagcggcaggtgcagcttacctctctgccgagcactttgacaccagactcctgtgtctctgctgcctatgggtttaggtcattttgcatttttctgagtagtggattagctccgagaggacgcatgcgctagtgatgagtcctgtactgtgtcactgtggccttgatgagtaacagcatagtaagaatcgaggttcaataatcctggagcctggctcatttcagcttccttacctgctcatcacggacttctgttcaatctctgatagagagtcctgtgttgtggggcgtccctctggcctgcaggatctgagccacagggaacactgatgaaagtagcctcaattgacaaacctggcgttaatcacatgggaagaggggccctcaatggcccaggtcagacttgcctgtgggaatgcctgcggggcattttcttaattactagatgatgtagaagggcccagcctgctgggaaaagactggctgagcagggaaccagggagcaagccagtgagcatcttcgtccatggtctctgctttggttcctgcctctaggttcctgcttgagttcctgccctggctttgctatggactgtaacctctaaacacgtactctttcttagaccaagttgcttttggttgtgggctcatttcagcaatagaaagcaaatttggacaggttttcattgtatatcttagggatactgtaacaatactaaaaataaagtatgtgggtcatagcagtcctcgaagtttggaggctccaagtccagtcatggtgtcgagatcagcatctttgaagacttttaggagagaatgcttcaccgcttcatcccttttctagtgtccctagagtgccttagtttgtactggcatctacacacgacctatttcccataggggtgtgtgtgtgtgtacacgtgttgttgccttttcaaatggctgaacatcttctcattgaggtctgtgtgtttctgcttctttgcatgaccctgcatcctggtctttgtgtggtattcttgtagggctgtgtccacacttccttagaaggatttcagacatgttaaggcttatcctaagaaagttacatctgcaaagactgcactagtaatataatatttacacataccggtgtgagcagtggctctctgtaagcacatgtagaacccatctgcaaaggtcacagcatgatttgttggctgttttagatcaatgtggggagttggggcacagggaccctggctgctgtgcttggcacaaacaaagcaaatcggacactcacaggaaaggaggctagagttaatcctgtcttggttttaaaaaaaacaaaacaaaacattaaacctgtaagtgtatgtgttataaaaataggctaggtagtacagtttctggcttcagcaagcagtgtgaattaggcaaactgtcgtagtagcaagttctctacagattgaatcttcctgtctctgatccttgtgtctgtttgctgtggcagtgagcatttccaggtgatagccaaagagtatgtatttcacaactttaaataaggactaatattgctatatttacaaagtacagagaaaatggcaaactggtgaaagttgttaggcaagtggactttggaagccgcaatgatagtctcttaggctatcactaggtggcagcaaagtttatggtctgactgagctgcaacaaacctgaatgaagcatatgagatatagaggagagagacagacagacacacagagagaacagacatgtgcattcatgtgtgtgtgtggcacactgagggagaaggtcagaagtaggaaggcaatgagaactaaagtaaattttccttacatttgcttccttctttttgcctgaaccagacctggatgggcaggaacaggaattatactgggatgaagtggtgtctgatggatgggaaattagatacaagaatccttccttccttcctttcttccctccttccctccttctctccctccctcctttactcccttcctttcttcctgatttggctggctgattcatttgtgggcaagtgttttcagaaggaagaagaaaattgggtaaattttagggaaacaagcaatcaggttcctatttaaaaaaaatattcttacagctcacttgctggaggagtgctgcaaatcgagaggggaaatcttggcttcgggtagtgaactaaggctgagattttcccaaactggaattcatcagattgatgtggggtcaacaggtggtgtgagatgaggagagcacatgcaccatagcccagcacctagaaagtggtaagtgctcagtgaatattgggtgctagtgtgttgtggtatacatgccaccttcctcagataagctgtttcacacagctaatagtgagggttggtgaaggaatgtctttaatgggggaacacaaccgcttgctaataaatgcctctgattagtgctgaggacacagtgccaacaatcctgtgctgtttgaaaccagatggatggagtggaacattcttcagtggtctgcaggatctgagccacgtgggacatccctctatggcctgcaggatctgagccacgtgggacatccctctatggcctgcaggatctgagccatgtgggacatccctctgtgacctacagaaacatccttctgtaacctgaagggacatccctctgtgacctgcagggacattcctctgtggcctgcaggttctgagccacatgggacatccttccgtgacctgcagggatatccctctgtaacctacaaggtctgagccatgtgggacatccctctgtgacctgcagggatatccctctgtggcctccagggaaatccctctgtggcctgcaggatctgagctacatgggtcactctgacacagaagtggcctcaattttctgaccatagacttaactaggaagattagggtagaaccattcacagatgtagcatcgtctcagtaggctaagtgttcactcacaagttgttctgcttgagtctatacagcccagccttactgggttttacggcctgcctgccaccttttcccggattccaagagaactctgtctattcctcacatggcaaatgactatacttcctccagtgtgtagcttcccttgctcctccagtcagaaaaatctaactttatgttaatgttctttggctgttggggatccatcagaagaaactttgcctgcatgcacctggaatctcatctctcagaaaaacaaacacctcttcccaatgtttcccacagtctctggcacacaacaaactgtctgttggctgaactgatattttgggctctgcgtttgcaagaaataatatctcttggtaaccccactgtttttaaactgctactatggaaaatttttgaacacacataagggctgaaacaattgtataatggatccatgagtccttttattcagcatgacaaattaccataatttttcagtcatgttccatctattttttttattggagtgcttctagaaaaaccaagctattatatcattttgccctaaatacttcagtgcacatttataaccatttttctaaccattcagccactatttcagctaacagaattaataattgctttctacagtttcatatcaggacaatatcatggttcccgtgctgtctctatgctttgttgtgcttgaatcaggatgcaaagtcctcatattatttgtagctacgaagcacttatgtttttgatgactacagctacccctcctccacctggctttcagagcattaatttattggagaaattaatcagctaccatgtagaatggccaacatagttgatttactgtcatctaacctgtccctatgtctgctgcaattcccactgagtgacacccagagtttagtttaaggtcagtttcagtcagttctcacctgtctctgtctctgtctctgtctctgtttctcctccctctctattaacctttccctgattgtagcttagatccattatttgactagttgttgcccaaaaatgtattttttaaaaacaggttttctaatcaatcattccttttgattaccttgcatttgtctttaaagcagaaagaagtatgatgcttaagttgccaaaggacttgatcagttcagtgagtcagctaactgtaaaagccagtgaccctcatgctttctacaccactgacaatatttgtcttttttttttttaatttaaggacaggaaatctaatgaggtaaaagcttgttcagcctgaccatgaaccctggcccatgtcctgatttagttaagatgggtttggtggacaacagctctcttcttgttagtcctcattttttccacagcttgggcacagacttagagactagtgtgaacatgttattgtgcctgtatatgtgacttcatgatgccctttaaatctgcagggaaacccagctgggcagcccttctctgagctacaagcatgagtgcatgtaggtccatcccttaagactccaagcggaccaaatgtagaggcgtgcttatgccaattaactttaagatatgttagatgatgtgaattaaagtccaattacattgggccacttaaatgagtttatgttgctattttaaaacacaataactatctgtccctagttatgtagcttccccacatctcggttttatcatccatctaatgagctggatgggttttcctagcctcagtgagggtgcatgacaattcagcataaatatagaatgtgtgccgctcatgacgtgctgacgttacagctaatgagaccagacagcagtctcctctcgtttctccctcccctgtcttgggttagcaggaaggtgtctaaccaagtctctcaagagaaacagtgcaggctttccatggctgtgtgggtcccatgacctcacctctcttgacttgcctgtttctctgaattcatggagcctttctttggaggcacgcaggcagcagggttctggtacatttaacacttcggtgtcaggcatacagccattagtatgcacagtttccacatcatcagagccatgtaaaaggaagtgcagaatgacagtcctgagcaagagaggtaaataaaacgagataccagtggcatctctgagaggaaagtctgtgctgtagggctgggacctagaaatggcacatccctgtgacactgagattggcatatgaaataaggttgatctgatctccgtgtgtttgtctctattctagtaacatccttttagagggtcttcatgctccccccacttcctggcatggggctttgcaagttaggatgccagggacttaaaacacataaacacattgacattcatcttgtttgctttccctagaattccattcaggtacctgaaatataccatggggtcacacaatttatttttgtgtatgaggtgttaagacctcaagagttgaaagttctgtttgtctttctgctgttctgtccacctctcacagccccccttgctttggatttaagtgctgctggttcattcaatggaaaggaaggagcaggaacagcccatgtctatgttgattacaggtacagcccatgtccatgttgtttgcatgcaacctctgaggtgctctctgggcatggcatgctccacatgcttgcagtggtgatgtggatcctatcggcttgcatttcaaatgccaacctcagtgttaagggattcgaaatttccaggtccctgcccaacaccagggtctgatatatggcctctcctgcttctcagtccttccagccaccccctccctccaataactcctgagcatccaatgcctggttagagtcttttttttttttttttttttttagaggaaactcaagctaaatgaacaacatcaaatacttgctgagtatctactgagctatccacaataaaaaaagatgtgagtagcctcgccctcaagagctttcagtctagaaaaacaaaaacaaaaaacaaacaaacaaacccacaaaattgttgcttggtcaactttggccagagttctaaatcttctcctattgtttagcaatatcctgtggttcaaacgttccattctggaggggggtctctttaagatcttcaagttctaagttgaaatattccctccagcaaagaaaggaaaatgctcatgagctcaggaagtaaacaactcacaagtctcacaaagttcctgtaactaatgagatacacacaccatctctctaaggttatggaagcagtaggaagttgctggaggaggaaagagtaagtggaactgcctggagaagtctctctaactggtggagctgtctaaatcatatgttctccagggtttgaattttgtgagtggtcacatgtgttggggtggacattttggtgatgtctttagttgtctctgcctctgtaggtcacccattcctgtataaatgcctttaaataaccccaacaaactcagttattctccaagttgtgctttgttgtgcttgttactttggtccacaatctgaggtgaatagttgttttctctcttatacatcaccttctcaggccgcctgtgtattttcttagcacagtttagctttaaccaaagaacccaaagtcagtgtagcaagaaccaacccccctaccccctgctgcctccatcctacatctggtcacgctttcccacaatcctccagaggatacctgatctctggtttgtattcagcaggcattctgctatgtcagtttagtttcccctatattttacttttcctcttagtagattcgtactcacagtaatcttgctccctggttccaaggcctcacttgcccatgttgactggatttgaagttgagcttgatcttattctcaggctgaaagaccccgctgtggtggtccctacatggacagtcacagtcctgaataaaaccttccttccagggcatactggttcctctctgttgctgtgattaaaacactctggacaaagccacttaggggagggaaggttttattctgtctacacttccaggccacagtctatccctgagggaattcagcgcaggagctcaaagtagaaatcagagagggattgctgtttgctggcttgcttgcagattctgtaagctgtaaggagacacacagtccagggccagcttcccagggaactgtgcatgtacgtacacaggctggatctgccgacatcagtgaacaatgaagatgatcacccacaggcatgccagcaggccagcctttctcaggtgactccaagtgatgtggcactaacagttaaaagctaactagtcagcgtgtttaactaagtgttattatcgaagtgttcttttactaacaacaaaatgtcacctactgaacttgcagctagcagagcgacatttgaatggctgtgaatagaatttttgaataatagaatttgttcagctagagcaatgctggagctgagttgtcacccaaattggtatcagtaacctccaccttcccgggtgtgtctggaatcatccatacaaggctccttgaaaagtctcctgggccccctctggcccctcctgcactggttttggaaagtgggaaaggttgagaatagattacagaggttttttattgttgttttattttgctaatattttcatggggacagaaatattatcaggcgtgctttcacaacttgtgctcatgggagaagggagatgatcccttcttcttcacatatctccaagctccagggaaaggtccacctcgctaagtggttcccagcaaggctaaagccctcgagactttggcttatggtgggaaagttcctggtcttttctctgactcatgcttcactcgggcaatctgccaggggagaccggggggaaaggaagacgtgggattcctatagctgaagaggaagagtggtcagagctgccttaaacctcatgaacagtcattctcccctgccctgctcctgttactctcccagcccacatgtgaagcgtatctaccacggcaggtggagacacatgtgtgccgcccactcctctgtgcctttaactttccattattcgagtcacacatgtggccctcacgtttctgctggatcgctctgtcctggacctctgcagccttctcatctttgttacctgactgctccaggctgtaacctccctgtgacccagggctgtttgtttcagggctgtaccgtcagatcctgatgcatagaagctttctgttgtaacctaagaagctgagagctgctgggggacttggaacaaactgtgctgggaaagcccatgtagcggaatgggtagacgtctcctacctgcaaagccagccacaacggctggcaggtctctccctgggtgtggcgagaaggacctagaaggaggtggcaagggaggcagcctcgtcactcaacggatgctgaggccaaggcgcagttgccaggcaacggctgagcgcagacgcccagagggacgcagaaaccccacaaactgatgcttgaggcctgggctccctaggcagagggaccggccaagactgagtagcgggccatggactcccgcgacgtgaaagaaaaggaggaaaatgggggaaaagaggaggagggagaggaggaggaggaagaagaagaagaaatctctgcctccacactgcggagcaaaccccgacctctgcccatctcagctatgccagctttcagctacatcccgccgcggcgccagggccccaaggagctcagctacttcaaccgcgagtgccaagtgagcaggtccagcggagggaggagaggggcggggcccgccctactaaggcggggcctggaggctgccagggatgggatgggggcggggcttcagtgctaaggagaggtcagggactgggctacatcactggggctgtcagatagtgacagggcagggcttctggaatagtgtgacactgtggccagtgggctaggactgagcgcttggggtagtgccagggacaacctgccaagtgttggggacaaggtacaagggttacatagccagtggcgtcagagggtagtgaccagaacaaactgtacagagctgtagagtccagaggaattgtatggggggcggggtatgctacaccgtggagggcatggaagccacctggcttaccgcttacagggctgcaagtttgagtgttgctagggttgaatacatggggcaggactccatgcgactgcttatgaaggggctggagggtgatatgctagtgggccaggcatggttagcaggcaagagaggccttcaactgagccgaagcacaacgatcccaagaatatggccaccacaaccggatgtaggcccctcaggaagtgaggatgggagctgggaggaggtccgagcataaaaggatcaggcaatcagagcccttcctggtgagctggccagaggtacgtacccctctgggaacagcggataagtcactagttgtctgttctctaaaaagctaagtgactactacaaggacaccaaatcaccctttctgcccaggatctgttgaggtggggcggggaaggggggtaagtgagaaccagggatgttctacttatggtggttcaactccccgtggctgtctgtaccaggtcttgggtagcagtggaaacaagccttaggcccagttacaatgccggtatggttcagggtgtgggaaacatctggtctctaaatggcagagacagtaagagtgtcttagggtgactgttgctatgacaaaacaccatgaccaaaagaaagttggggagcaaggcctttatttggcctgtatttccacatcactgttcatcatcaaagaaagtcaggacaggaactcaaacagggcaggaacctggaggcaggagctgatgcagaggccagggaggagtgctgcttactggcttgttcctcatggattgctgagtctgctttcttgtataacccaggaccaacagtccagggatggcactacccacaatggactgggctctcccccattagtcattaattaagaaaaatgacctacagacttttctacagcctgaccttatggaagcactttctcattccagtttctatcttctccaatgactttagtttgtgtcaagttgacattaaactatccagcacaaagagtgtgaccagtgagtgcagagagctgggatgggagctgtagtcagattccggcttgctggtcttgggcatgactctgtggtctaaggtggccactgtgcactctacaccagccactaatacagaagaagcaaattgaggctgtgtggggtcatttgttcctgactaaatatcatcagcccatcctgcttaggatgccagattcagggtggcatcatgaaaaagagacattaaatatggatgcttgcccccaagaaagaattcaggacctgattacccatgtttttttttttnnnnnnnnnnnnnnnnnnnnnnnnnnnnnnttttttttttttttttttttttttttttttttttttttttttttttttttttttttttttttttttttttttttttttttttttgctgtggcgctgcatgagttgcccagaagaggggtgtggattaatcaagtgcctgggacttttattccttcacagtgtctaaggtgctcctacataatgcatccttcctaccctcccaccagccatcccagagctcaagtgaatcctcttcccttccaacatgccagcagactcaaagtgtcaggcactccagcaacaggaaccattcttgctgtaggcaactttagtgtctgaactcttaaaaactcctgttgtagggtcccgattccaagtgctgcagaacgcaaacttacctggaggcatacttctaaagtggcaatcaaaatgaggtgatcttttggggtggcccttaatccagtatacctgagcagggaagcttgcacagacagacatgcacagaaggagaaagatgtgaaaatgtagagggaaggcttgtgagggaaggacacgctacaggcagtttggagcacagtcttccctcacaggcctctgtaggaacggccccgggaactagattccatgctttcagctttcagcttccagcaccaagagacaatgtatggtcattgtttaagcctcttcatttgtgaggctgtttcagcagttctagcacaaccaagttagcaaccacaagccccaactcactcccagaagggtctcttatccaacaacagcatgtctgtttacggttgagcaatgtggaaagacagtaggatcaagaggggaggcttttgtcatcagatctgtctcctcaagcgttggaaacgtgctggaatttttagaagggatggggtgtgtagctgtggcttttaacctcattgttgcctcggatcccattctgtgaccaatattcttaaactggttggccgggcatgatggtgcatgtttgtcccccagcacttaagagtctgaggcaggagaattcaaggtcaatttgggccacatcatgagacctctgtctacaaagctaaccaaatatataaataaactccgatctgtaaataattttatctactgaatgaattttacgtaagtgtccaacacctataagatagccaaattaatgatcacaacagtcttagtgcacagaatgtgacaaacagccaacaaggttgtgtctgtgtaatggaaactttcatagcacatcatctttaggggtgtcccccagaccagaggacgtcagtttaaaacgttagcagatggggcaagataaatatacattagagacagaggctaacttgcagggtggagctaaggattctgggtacatgggcatgaaactatttattgaccactcttgcattatttataataaagtaagcaatgtacagctagataacattctgattactacagaattattttcctagtccccctccccccactgaaactctaacccaataccagacagcttaggtttacacagagtggactgtgagggaggatattgtctgatttagagggcataacagcttctatagctggaacttcaggacttgggtgtttgatgggaggaacgggagggacacacattgaagctctggccccaagaggagacattacatcctcagcctgcctggaaggccattaatagattccagaagtcccaaagtttataaaattactacaaagcaggcggctttctgataaaaaaccaaggacatcccccacccccactcctaaagccgaatggaacaggctgccaggcatctggacggagaggccttagggaaaggtgtttgctccacagactttagaaacactaccgaggcttctgaatgtgcagaccagggcactttctctctggccaccatacattctcactcctgagaacgtgctctcctctcctctgcctgtctcccacactgcacactgtgcgtcttgtctgtattattccaatggaagacgcaaagatcagacatctgcagggagaccagagcaaggctgagtttgggcaaagaaaaataatatgcagatcagtaactgagatgtcaaattttgttcccctgcttatgctagtgggccctcatttggcagttcatctaatcacacggactacatttccaccagcgacctcacctattcagtacacagatttcaactgtgcataaaggagcacttccctaaaggaaccctcaaaaatccgcttaagccgggcttagcttattagcccaggatctgtctggctcccttgtctaggtggggagttgttggtagtggtaaaatcagtctttaaggaattttgtaaataaatattgtgatggtacagataggaaatctgatatggctgtttctgagtcgctgcctgagtaacggctgaatcaaccattggatttgaaagtttacactttaggtacatcttgaactgaagctgaagtgctctcctggcttgactagctcgatggaatctaggagcatgggcatgattttgttgcagtggatatttaagaacaaaaactacttacatagatattttatgtagacacacataaacaaaatcgtagccggtacttcctcatactagttaagaataagttctgattgaggaatcgctagacaacttcccaacactgagaaaaagctgttctccagtgaagagaagctatattgtctgataagggacagccccaggaagctgtcctctatggaaaagtagagtgatgtttgatacaaaacaaaaagaaatccagcaacggttaatactttcaaaacccacttatcaaacctgatttccattggaatgtagctatttcacactatcagttcaaaaactaagatatcagacccctccccccctcacacacacacagttactgagcctcctcttctggacaagggtgccaagtcagtccctcttcctgaaaagcagttctaatctgagcacacttcatgtccacctgagattatcacttctctctgctgtctgtgtttcccctcggctccctgagcaccagtacctctggaacaggctcgtgctttgtcagcagcccctctttccatcctgtatttgtcagtatcagattcactgtgaggtaaacacttcctttttgtgtcaacttttcctttaacatcggttgtgagaattaagaaatatttctatttgttctagataatatgcatcattttcaggttcctgcaaactgtcagcatttgtccatcccttcccctccacaaaggccctgcctcttcatttatttcatgcaggtccagcccccctttccatcacagcttcttcaggctctgcaactttgacagtcttcttcttcccattttgtttctttcccactttttatttttatttattatttttcgcatgacacctctagctctagtcatattctgcccacttccttttaaataaagtttaactagaacacagccccccctccccccccgccattaacttcatattgtccatggctaccgcactgagttgagtagttttgacagagactaggtgacctgcaacaccttaaaaatgttactgtccagcaccttacagaaaaaagattcctccagcacaaatgcagcacaattttagcaaccagagctactgaccaaggttaactcctgaagcctcactagtacatgaaagaaaaagatgcaaacaaaaccaccaatgtcaagattgtctcaagatcaatgaggcaacaaaacacaactccaaattctcctgactagctagctccctgcggcactaatgcatacccctcaagagaacatgggctgcttttgaagcagtaacaggactgaagaagtgaattccccgacctcttggttatttagcataatgagggtgaattttgaataaggtttgctgagaagtcaaccgtgcatatatccacagggtttactcaagccgaacagcagttccgatgtcagcgatgtcagcgctgtgttctcaaggtctgctccaaatccccaaatttgcatgtggaaatcctattcccctcaggtgatggctttaggagtgggtactcctggaggcgcttaggtcaccaggtggagcttttataaatggaatcacacctttgtaagagacagggagggggacacttcactcctcctactatgagaacacacaacaagaaggtgccagctgcaaagctgggaacaggcccttaccaggtaggagaccattcagaaccttagctttgggcatcccaggctccaatcagtaagagattaaaaccacccactctgtagtctgttgtgtctatagctggagtgcactgaagtcgtggatggctatctgctgatgcccttcgggtgtgaaggtcagctctttgccaccaacaatttacctgccttaaagcaaaccaacaggaggaagaagttggcgttgactggtggtttcagtgcacagtcacttggtcctggccctgtgctgcagcatgtcctggtgcaaatgtgtggtggataaaggttttttttccccccttactgtgcctgggaagtgaaaacagagagagcaagggggtggaacaacttttaaggacacacccccaatcatctacctcactgggtccagcttcttacatttcttccaccactcaatagagacattatctagggaactagacttccacacatgagctctgtgggacatttcagatccaaaccatagacatgaactaaaatttaaaaacaattaaatcataagtgggtgagaactcctgcctccatgttgactagctttgtgctctggcccaagatacaaaccctctatgtcattctagccatctgtgagacaagcagattcaacctcgtaaagctcgtaagaactgacatcactgagttgagaagacaagttgagttgcaaaagaactagttgcataagtgtaaggacccttgttccaatccccatcacccatatgtgcagctgtgcttgtaatcccgaccccatgctgggaagatggagacaggaagagctcagagttcactgctatacagtttcacagaatcagtgagctccaggttcagtgagagaccctgactctttaaaaacaatgaggtggagggcaattgaggaagatacgtttatcaacttctggactacacacagagagatacacagacacacaaacacactcatgcacacacacacacacacacacacacacagagagagagagagagagagagagagagagagagagagagagagagagagaaagagagagaatttatttaattaaccagtgtgacatgagatgcaacaggccccctgtaatgcagccattgttctttcactgtagttactaatgattaatttctcttttctaagtgcccattcccagcagccagtctctcacatacccgaccctccttcactaccagagatgaattcagaggactgcagtaaatatgagcatccatccattgcccccaatcttctaactcatccaccccagagagctgaccacactcacgctttgaagtctgcaaagttatttaaagcccagataatgccctgaataggatggcaaatggtgtcctctcaagccaccatctaaaatgtgaccagctccggtactgctctctagggggctctagcagcccgtgtttccctaagaaaccaggttccagaggcagcaaagcagattcagtccagcggcattttaaattacctgttccttcttgtgttgtgcacggcacttctgcccctgaaagggaaagctgagttggaagagaatgcccttttatgaaggttttgattaaatccctcaaaatctaacagttacattaaaaagaaatcgcctaagtggctttagaatatgttttttcagcatgctagggagaatggcagatgttttgagggaagccgtactccacatgtctcactctagctttgctgggatgagctggaatcccttctgcatgtgcagagtctcacacatgagcatccctccctgactgtgggatgtcctcggtgtagggtcgtaagatcttcctgtgtgtgaaagctcatgcagcaaagcagagagtcccaaggaccacggccagcatccaggacacggggagcatactcccagagccctcactgtatggtgccctgtcactttagacatcagccatatttgaccatgtgtgtttgagctcccttaaggggggggggtaaaccattctgcggccgatgtccctggtaggctccaggggtcttgtctcccatgtccagtagactcttagactcacagccaagctagtagaatgcacagtgcctgtctgcatgcccactccctctcccactcatcaccccctttcttccccgttgcacctgttctcatctagcctactaaagatttcacttgcttatcttactgctgtgtttcccccagtaaatcatcagctgccccggacaaggattgatttctctcatgccatctcctagccaatcaaaacagagactggcttaccctgggaactccacaaaggagggatggatacatggaacgggaagttttaaaagcaaaggcctaagccacctactttagaagaggaaattagcaaactggggttctctgtttggattatgtgtgatttagtcctctacccatgcagtgattggtgcgggtcacaggtgcctctcaccggtgctagctagctgcgagcttgtccagtgacccactatcccccaggaacagcaagccccagagcgtggagcagaaagtcttcctccaaggcaggcagtgtcttctaaaaggaggggcccagctcctcttgggagctcagcaacgagaggaacgagggagggaggaggccagtatgcctttccacagggacggagaatgttcctaccaccagcggcactgcccagaaactgatgcggcttgtctgtctgctgtgtgcctctgcgtgcaacaatatgggtccgagcatgtgttcacgcacagaacttctcacaagcatgtacatatttttcaggtttctcgtctgtgtgcatgcaggggccacacgtctctgtatgtgcacacatatggaggccaggggacagctatgggtgtggacggggtcccacgttgatctagaggttgcctaggaagctagagtggctcgccagtggatccccagggatctgcctgtctctatcttccagctctggaatgacaagtgtgagccactgcacctgccctttttgaaagatgttttaatgtggggtctgagggttcagttcaggccctcaagcctataaggagagcatcccagtgactaaaccccctcctcctttccccacaccttctattctttttctttttcttcttttgagacgggatttgataacgtccccaagctggcctggacctctgcaagcagacaaggacgaatccaaactcgtggtgacagtgcctcttgcttgaggcactagccttgtaggcatgcgctgcgcatgcgcagccgttcccagctcagctggctctcttcacctggcaatgtgtgctgacattttttatttcacagtttgatgagcagctttctcgtactctaataagattctaaggttctcagcacagcacaagtgaccaatggagaaagtgaggtttttctttcatgtcttttgtttatttatgagtttttaactttttggtgggggaagagtgaaaaattttcaaacgagtttacttagctcagacttttaaggactaaaattctcagtggcagacgttggtctgcgttgagtctctgtctattggctgcactacctcaaggcaccggtggaacactcggcagggcgagcagtcacatgtacagctaggaagcagactcgtgcgtcctcccaatcccttcaaagctgtgcctgcagtgacctaaggaccctggctcttaaaagtgcgccaccatcttacattactgtcaccccggggaccaagttccaacacacgaacaaagcaaattccagccactgcagaagtctgaataattgtaaccaggcagcacaaggaaacaactgagttttcagcctctggagatcatcctatcctccctggtgtgagcttctggaagcctggccagtgaggagctagtatcagtggagggggaacacggctggccctgcagacacccgtcctcccctggtaacgaggaggcccgagaactaaggcagaaaccactcttccagtgtgagacagacgtgagtcacccaggaggaattctgctgacttcagttcaagaggaaaacagtctcagatcttttgagaagttgtaaaaattgtcgaagcttacgatcccaatgtgccaggagagggaacaggatctcgtcgttgtccacagacaagccacggagaagagttaaacagtccttcaaatgttctgattcccgttcctgacaagctgcagccctctaaaccacagtctggagtgctgtcaaaattctcttagctcagcataccgccgactcccacggagatgctctgagttcatcagaagtcaaaggcggcacttccagaatcagtgacttcaggattttcaattttgaaaataggccagatgtccgcagcgggcagtgctgtgactttgaggtgaggggtagcagccattcgcaggtgattgacacttcggtattcaggcatagacacttagtcagatccttttcaagcattatttctgaactctgtacttggttggctgcccccaaatggcctcagcgggaacattttttttaaatttaaattttattttatttatgtgtatgggtcttttgtttgcatgtatgtctgtgcatgcctggtgcccacagaggccagaagagggtatcatgcccccagaactagattacaggagggcaagagccatgcaggtgctgggaatcacattcaa

SEQ ID NO: 2 - DNA, 32765 bp, Cricetulus griseus
  >scaffold_0 dna:scaffold scaffold:CHOK1GS_HDv1:scaffold_0:127961999:127994763:1
aaaggaagggggattcatctacatttcagattttccaaaaagatggtgagaaaggccatgtttgggtagcacattctttctccatcttgaagttcagctacttaacagcagttggaatgacgtgagattgacagtgggtaggactaggggctctgaggctggagtcctctcacaccataggggttcattctgcctcctgtatgtgctggccacgggtgaggctctctcttttcatctgtgagcagtcatgggaagtggtgtctgatggccttcccagtagctatacatggtccctcccctcatctctgttagtccagccattgtgactcataaattagacttctgtggttatagactgtggcctggaattgttgcacaaacctctgtttcaagatcatcttggattaggactaagactgctcagctttggaaaaacaaaacaaaaaagaactgttttatcaagattgcagcctgctctggccgcccagggtaacttttctttcagcttcccgctgttgaaggcagagaccctgtgctttgggtgtcaccgtgaattttgtaggcttggaaggtcctgaccttgaagctgggggcctaactctagggaatcccaaccccctgggagtaaagctgttcttcttcctgatagagggaagatgccagccataggcagtctttgttttccaatagtgtgctttaaaaaaaaaaaaagtaaaatgaacttgtctgctacattttactcatgctcgaatgtttaaaatgctgcttccaggcagtcagttggggtttggtatcagtgtgccttgtgtctccttatagtgtgttttaccagcggcatgcatttagttagttatttggagctggggttgaaactagagtcctttcctatgcttagcacatgctctacctctcagttctgtgtccagctctagtagtgtgtgttctgggagtgatgtgtctgtttgtacaagtggcgtttcctgtgctctggacccatagctagtggttctgagctgtagggaacagtccagcagctgttgtgagtgtgctgtagattgatctacactgaagtgcctctggcttcatgctacttctgcagtgtaaaggggtgtttcccctttgataagttttcttgctttttaaagtacgccatgtcatttgcagggttccatgttagcatttcccccttctctctctctctctctctctctctctctctctctctctctctctctctctgtgtgtgtgtgtgtgtgtgagagagagagagagagagagagagagagagcagtgtgcactgctgggggtacactcctcatgaggtcgtgtgttactagtcagtcgtggggaacagagaacactcagaattaaagccacgggtatagacactgctgtgtctttcgagagaagctgtggacagcgggctattggagatgtctcttgagacttgctgtgactggggaacttgcctgcatcgcagcatcctaaattttaacctgacagcaggactggaagatctactcttatagatcttctgacatgcaggaaggacacagctttgtagattgtttggtgttgctagtcctgggctgtgtgcctgttgggcaagtgtgctagaatactgagatacatccccaggcctataaaaacttaaacgtttaactaaaactgtttgcttctactccaagccagttgtatatcatggttgcccccattctttctttcccctggttcctgaaaccctgtaagaatgttcctcctaattacaccctggagcagttcccacagccctcttttggttaggtttcatcagttacatgcctgtgcctaactcggcaggatccctggttattagcacattctctcattctcgtgaacttcatgtgcctttcccagagcaggcacagggttactgagtaagaacaggctggctctgtaggcctctaccaaggccagcctttggtgttctttgtgggaccactgcagagtcacctccaaatgaacagggactgcagattccatttacaagagcaaactctgaaagcgatatgttttcagaaaactttgttgtcatctaatgtcatagaagagtacaactggtggatataaacatgagagttttaattttcttgcagtggtgaagtgtgttgctttattgtgaaaatgaatttgttcccctggacaggtacagagtaaatcttcagagcccagggagaccacaacatccggccctgtgggtgccacagagaggaatcatggtgaccattctgagctggacgggcagatgaccacaggagccggtgactcagaagcaacacacactgagaacacagagtgtaatgaaaagaaagatggcgtgtgtgggtgaggaaaactacctctggacatgtaaactaaatggggtcccagagccttagccgtggaagtttccagggagtgagcacactgcccagattgtgtgctagggtcttcaggcaagagagcaccacagctgctgtcagcactgggtactggtggggcagggtgagtgctgtgggaatgaaggtttctgccatggttgctgatggcccttaccacctccatattccctcctcagccctcctccatcaaagaagatgaagttgtttggatttaaagaagatccattcgtgttcattcctgaagatgaccctttgttcccgccaattgagtaagagtcctgccgcttgaattccacatcaccagttgcatacggctgatgttttgtagttagatccttcctcctgaccgaaacttagaactgggtagtgctagagaggcgcacctgccttaccacccggaggtgagggcgtcagaagggccgtccaccaggacccaatgtaggttcgtctcactccgttgggtgtagaggcagtggccgcgggtcccagtctgctcttgttgggaagcggaggagagagtaggtctgagcagcagaggagttaccctgcacggggacacaggaaagcatactgtgagagcgttactgtttggcccagtgcgggagtctgggctcttcatcatccgagtagcagttggtagaggagctgctcctggaacagcccttggcctggctatcctccaggcccatcctgcttgtgctttgagacaggtggactgtgtctgaaagtaaggttctgtttcatgccatgacgttcatgggtgtctgccctgggctgactgtaagcagtgccgctttgttgacaggaagttttatgccttggacccttcgttcccgaggatgaatctgcttacccgaactacagaagggaagaagcgtcaactttacatggtctccaaggagctgaggaatgtgctgctgaacaacagcgagaagatgaaggtgagggcccgatgaggcatgagcaggttccagtgccccccaccccatttcattttctcccgacacttttcctcgggtttgccagcctagaacagtgctgtggtgaaccgccttgctcagctcctcttgggtgtgctgggctatcggggcagtgactcgaagtgcctatgtcttgatgtacactgaggtgtgtgtgacttactcttgtgtttaatggttgtcatgagctgtggacatagaagcagttggaactgagttgactcttgggaaccagttccagaaggggccgtttctctccccatccctttccaaaactgctcataggtggccgtgttaccttgcagtggaaggggctgcagtaaacaattgtccttaactcctgtctcgtctcattcttaacttacaggtcattaacaccgggataaaagtctggtgccgaaataacagtggcgaagagtttgactgcgcgttccgtttggcacaggaggtaatttgggaatggaaagtcctagccatggtggtgtgagacagtcaagagagtgccttatggcatgtcactagatttcagtacttcaaggcttgccagagctgaccaggctacctaagaggtccttgggttcctctaaggccttgacccaggggagggactttagacaagtcatgaaccccacagtaaaagcatccatggaatcacagctaatactcacacacactctctgtctggactcctgcaggggatatatacattgtatccatttattaactcaagaatcattactgtgtccatggaagatgtgaagacgctgttgacacaggagaaccctttcttcaggaaactcagcagtgaggcctatagtcaagtcaaggacctgggtgagtaactggacccagaggctggcatgtgtgtgtggccttcaggggccctgcacacttctcagtcacatgtgtcagtgcaggctgtactcagttgacacaggtctccccttagcatgcttacagccctggctttgatccccatgaactgcacagactgaacctgcctgcaatcccagcactcaggacatgagtcaggaaggtcaggtgttcaaagtcatccttggctgcacagcaagtaatatgagtaacagctgtgggtaggacgttcactctggagggacttttaagtcacccacagatgacttaacattacagaggctgtaagtgggctttgtgtaaatccttgacattcgtgtgaaagactcaacacctttttgagggttctttcccttgtccctgtggaacccctactgctatgaggcagcaccactgagtttatagagcactggggcctgactccccaagccgtgattggctgcaccttgctgagctggacattggacatggcctggggtcctggtcatgtggcccacatgtttactctcgagttcaggttcccctctgttactcctgagacccacaagcagtctgttgcactgtctgtcctcttacactcctaaacttctgcgttaggtcactaggtcatggtggtaacatctgcagcaagccccccttttcctttgttggcactcctctcacgagtatctgttggtgtgtacagacagctcactctgcagctgtgtggttctgggcttgtgtgaccttttctcaccctggtgtgagccacaggcatgcagagtttggacattcttatctcccactccaactcctcagaaccacagttcaaaaggagaaacaggaactttatatttctttctttctttttttaatcttatggtttggcatgtgtgtgccatagtgggcatgtggagcttccttccttacactgtgggttctgggatcaaaccccagaatccagtcttcaggtttagatagcaagcacttttaccagctgggccattgcgctggccctcatccttctttgaggtggtggggtataggacttgacgattctcatgttactgtgggctgcatctaggagtgctgagaattgaccagtaattaagactcagcctcctgctccaccaagagttattgtcttgaaaacaacacacacgtcttagttgtggccactaagtgaaaacttggcacatgtgtctgttctcttttcctccagcaaagggaagtgttgtgctgaagtacgaaccggattcttcgtaagtgtatatgcctcactgttggatatgtagctcatggtgtgaccccaacacttgaaggctagggcaggagggtcccaggctacagcattttcagggccttgccctttggggagttccagataacaaaggcagtaagatggtagccactgggtgggaggaggaacagcaaactgactgcgcccatggcaggaattggaggagtggggacagcttttttttcttttttttttttttttaagaagttgcacgtcagtcattagatgtagctaacaggttgcttaatgcttacatgggtccttcttcgttggcaggaatccagatgccctccagtgccccattgtgctgtgtgggtggcggggaaaggcttctattcgaacttttgtgcccaagaacgagcggcttcattatctcaggatgatgggcctggaggtgttgggagaaaagaagaaagatggggtcattcttaccaatgagagtgcagccagcccagagcagcctgaaaacgatgagggtgatgagcaaacaacacaagaggcctgcgtcccagatgccacaactggtgacccagctgcagctgagccatcccggtgaagatgtctccacacgctgaactgctagcgtcccttggtgttggagatgaaatccagaatgtccttagcagcgaagtgtattgttgggggcctatgcacgggtgggtggcagcagtctggggagagttgtgttttctagcctttaggagtcccactggcagattggatccgtgtctctgctagtaaaggctgatgcaaaacagcctttgcagaagttcgggtcccttgttgggccaatattggcctagtcttttaaaaattatttatagtaaaaactacaactctttaggaaacggctctatgctttaataacgtttggactgcattggtgcaccatgcagtaatgctgtcacctgagacctcaggtgacttctgtgcctttgtgataaagggagaagtaagcgagagtgaagacttcccagagtgaagactggtgaatcatgagggtagttgtggggacagttctgtgcttacctagcaggtgctttaagttgggttgcacttacttgggtcatgaaataaagagctattatgataacgtgtctctgtgtgtgactttgatttgtccttcgttgctaataggagagaaagcccagccctcttggtctctgttataagcattgaagcaaggctaccatggagttgtcgccagtgaatcctgaacagcttcctgctccagtgaggtgctgcagactggattggggtttactggactagatccttgacctggttttagcacagaaccaacctcgtgctggttgagcaatcgacttttcagcatttaagaatggagaagcagagcagggtggagctgtaccgttcccttgcctggcttccagatatgttagcctgcttatgctcaccctccccagcagtgctccatctgtgaccatgtgtacatggagagcttcatgcagctttccctgtcagtccttggtactgactagcctcatgctcagaatcttatctgatctccttatcagtgcacgcacatgcagggcagacaaggcacctgcttatgtctgtctctgccctgtcaagagtgtctgcttctctcgtattctccaggcaggattcttggagcagcatttccttccttcctgtgtatgtaatgtacttggtctgtgctgctgagcaacagttacaggcacaaaagatcattccagctgggcttgttgacatctccaggggagagtcacaggacactactcacctgaatgtccagatacaccatacaacatgtagtaactctgtcttggggaagggctggagaagactagggtgggggctctacctaagtggccatgggaaagccatttgctggttagagacttgtggggagggacacccatgccactgaagtagctctcacctgccctatctaatcccagtaaactctggttccccagaatgaaccttggtagaactgtggagttggtgaagtttgtctggactcctaggaggggtagactttacttacgttcctcgttccacaggaagaattttagcaacagtggacctctcctaaaaataggtcttagttatgaacataaccttgagatgagaaggcactaagctgtaactgctggaagcacctcactgccaaatggcacagtgacattctcaaccagtgctggttgccatcttattctgttctcatcaaaggactcctgggattcaggctttgatacagtggaaaacttagaaatgcagcaatgaagcctagttagggtcactattgctgtggtgaaacaccgtggccaaagcaatttggggaggaaagggtttattttggtttacagtccatcaatgaaggaagccaggcaggaactcagaagtgcaggaacctggaggcaggagctgatccagaggctatggaggggagctccttactggcttgctcagcctgcttctagaacctaggaccaataacccagggaggctgggtcctcccctatccatcattaattaaaatgccctacaggcctgcctacagcccagtcctatagaggcattttctcaattgaggatcccttcttttcagatgactccatcttatatcaagttgacataaaactagctaggacagggcccacccatagaaacatctacaagaaagtcacttccaagcatctcccagaggagtcagcacaggcctgctttcatccaggtaagcaacccagtcttccagggaggctcagctaatctcaaacccaggtttttctaggggtcatagaggtgtcttctgtggcacatctcaaactccaggggaaggagaagaacactgagatctaagtgtcctgaagccagctaagggatgcctctgcttgtccttctccaaggagggaaactcaggcccaccacattgggaacagattcaggctagcaaacctgtgagcagaaggtccacggagccctttgggctttccgggtccactgagtaatatccagtagttatttcagaccactgaattctgtggtcatgcggtaaaagcaacagtatcctctgggatcccttccccgggattcccctgtccatccgctaaaggcttagcatctcattttgacatggacatatgtgctgaggtaggtgtcctggtacattctgattcaggacaaaagagcttaagctaatagtgcatatagataagcaaacattgctttttttttcactgttctggggaacagcattgtgtgagcatcacttcagagttcacaggtgtttgtcaggcagtctgtaagggcactaattgcccttcaggagacctgcagccttctgacctaaactcctcccacaggccacatcccttaggaacaccagacagagcctaggtttccaaatacacatagcactaataaccttgatggagcttggcaagggttgagatgaggcctgcctcacagggatcaagccagcagggaagtcacgctaggtaggccacttctcttctggagtgcagtgtgactgcagaggaatttcagatgaagccctgtgtggggtctccaacagttcccagtcctgaaacaggagaagtcagccacggaaatgaacataaatatctgcatgttggggtagcacaaagaaaaaatgaagggctccatagtctcaggccttgtgaaagctagttttaattgttcctcaagcgggtttgttgctactttaaacctgaccatgtgggtgttaagcctttggaaatgctttgtggaaggaatgaggatacatttggttcattggctaggaacgctgggagcagaactaacaggttattatagcaggacactggaagttagcaatgctgagaaaaatttcaagggcaaccaggactctatcagtaactggaccaggggccattgtggtcatgaatctggctgtgttttgcccgtgtcccgagagcttgagtagttttaagagagaacataacaaagtgatttgtctggcacaaaccatttccaggcaggatggtgtctgtgttggtgcttacgaagcagctagctaaactggtaccattgtggtgaaacctcctgtgtgggatgactggaaggctgtcttagggcaagaagcacccatcagaagcttcgtcttgttgggatccgaattcatttagaggaagaaagcctaagttaatgggttccctggtctttgaagccactcactgcctagggaaatgtttcctcagggttagcacacagaagctcatgatagctgggggcctggggggctaagtctggagcttgtagcagaattttgcagtgttggaatcaccatccatgtggcacttgttctaaaggcaaagatgcaagactgaggggggtgttgatttttaccaatagaaactcaggagccagatgctgggatcaaagcatcttagctcagagaggcagagaaagctccctgctgttctccctactcagccaacatcccagaaacctttctcttctcctcctcaaactgaatgtccctcccttctacttcctgcatgtgtctctgtccgtgcttactctcactctctatgttgtttttcttaataatcctatattcactttctgtcaacttgttgctcctgtacctcttgacctatggttgactttttttaatcctgtttacagtattcaagcagaaagctcttggattaaaggtgtgtgctagggctgagccacaccacaaccggaaaacaggcttttccagtaaataatacaatctcagtgttcacattgtgatcaaatatccagcaatagcaatctacaccctttggagcccagttgattacaaatcaaagacacagagttgcaaaatttgttattttcccttctggatttttgttttgttttgatctcattgatcctatgtcctggttcttcccttttggaaaattaaatttactctgcctgtatatgttggaagtttgtaacttgatttttattttaaaggaacccatagttaaaggctgttaggcttttcaagtattggaatttaagtctatggagactttaagtttgtaatttacattatgatatacgcatgagactttgggacaaggagtggaaacttatggtttaaaagtgatgttttaagacgtctctctctctctctctctctctctctctctctctctctctctctctctctctctctctctctctctctcgcacccccccaaacacacacaccagggtaccagggtggcaggatttttttcctctctggaattttagttgtatgcccagtttctgccatagctacaaacccgttaaacccactctgtgaattgatctgagaacagaatctgaggtttataatgaagaagctgtaagtacaggaaggaagtcaggctgtgcataggtgggagaaacctgtgggctaaagaactgacccaggggcttgtgctcaatggctcaatcaggaagcaatgttagacccccggaaaactcaggtatccagggtcccaggccatgtccgcggtcaccccaatcaccaggcagattcgagagcttgctgcaaactgcatgaggctttattgtaatttaaagagctaaccccatgttagctcaggtcttttgtccacccaccatggctgttggctacaaaagacagctcgaaccagctgcagagagagatcttgtagggcagcgtaaggggagtgtctagggggtacgcacaggctcaggactggtgtgcctccaggcttggagggcttgccctgtgttgattggccaactggttgttatggcccataggccctcccagggtggttgctctgttctgctcgtcattgctgtgcgcttgtccgtaaagcacacccagagtcgtaaagcatagcaccaccagctaacttctgattggttccttgtcatgaggcaggcacctaacctctagtgactaagacaaggtcatagcgagcacatgttactgtcatggctgccgaaatggggagctggtcccttcagcaagacctcctgttcttcatactgctcaagcttaggaggctggaggtctgtggagagttgctgtggtaaaacaccctggcaaaagcaacttaaaaaagggttgtttctgttcacggttccaggttatagtccaacaatgcagaaaggtcatggtagcctcgtaaggcactggccatatgccaccaacactccggaagtggagggaaatgaacagtatgccctattcacttgcttattttaatacagtccaggatctcatcccaggggacggtgccacccatagtgggtgcactttcccatctcaattaccctagttgagataatccccccagacacatccagaggaccttatcccaggcaatcccagatctcataaaattgacagtggagattagctgtcaggtgcaaagcgactcgctgctgtagttgagttcttacaaggtatcttgggaggagtgccaattagtgtgctgatctttacaatattggagtggggaagacgttttaaaatatgacccaagccccagaaacatgaaaagaaagatatacacaagttcaattacataaaaaaataattcccacatgcaaagcagcagaagatagctgacaaattgaaaagcatgctgaatcaaagggctaatttctcaataaacacagagtgccttcaaattcaacaggaaaaaggtcaccaaagagagaaactggcaagacagataaatactaacagccaataaacatgtgaaaatatgcccgacctcattaggaaatgaaaatccaagcaattagtttttgtgcctgtcatattgtatgggccaagtgcatgttaattaaacctgtatgagtggcagttttatcaatgccgccaagtaaaaagtgctcaaaccctttgattgaggaattgtgcttgcaggaagtttgactgcatagtttggtaagtgagatgggagagggccaacctgcctggtgagtcactgcagcattgaaagtgaaggctcaaaaagcactggccattcggaacaactgggtcaattatgggatgcccacagtggaacaaaggcgtgccggtgtgagagtaaggcggcccacgtttgctggatcgtgtgtgaatcagcatgtgtgaagaaggctggtgtggaatgtcgcagagcctgccagcattggttttgccttaagtccctgacgatgcatagtggctgtagggagaagactgcatgtgtggggtgcaggaatcaaagaggaacacgttatacactttctcatttcatcctatgtcagggtattgtttaaaccaggcaaacacttgaaaagtaatagaaatgaactgataataaggcagtgtgacgactcaccaggtaaaataccgtcatctgagttcaaagcctggaacccacagtggaaggagagaactgctctttgacctccacacacaagcattggtgttgtagcaggtctgcctgggcagagatgaagttgcttttattgaagagaatcctgtgtccctgaacctgactatcaatggtccccaagatgctgggtttctcccaggaatctcatgaaaaagaccctgtgtagcaagcactctttccagccggcctggtcccgctgccacttcagccccaaatgaacacacagagacttatattaattattaaactgttgcccattgactagggcttcttattggctagctctgtcttaattactaactcatttctatcaatccatgtatttccatgtggtcttggcttaccggggaattccggacctgcaactcccttgcctgttacacaatgactgctcagcatctccacagagaacgatttcctgtttgtccctgcttatatcctgatttcgcccagctacgtcacttccattctggccaatcagccaatcagtgttttattcattaaccaataagggaaacatacacagaggaacattctacatcagcccttctctgccatttctggtctggtactgagacctggctcccatcttctctctactccatttcaaatgcaccatgctctaccagcatcccagagactttggagcttccagggtcctcgggctggtccatgggaagcaagaaggagatggccctccttcttgacctccgtaagacccacgctgagaatagaagatgtgtgttctggctccgtcttctttcctggtctccagtaaactcaaccgttcatgttctataattcactggggtgatgggtgagcctcctgtttgctctgctattactagggaggggtcctgacaaagctgtcttagttagggtttctattgctacaaagggaccccatggccatggcaactcttataaagaaaacatttaattggggctcgatttgtcaggagccagctctggtcagatataaaagtcccctttacagaggcttggcaacctccatgctaaaccgccaattagtcaagcaccccaccctttaggttagtgttcgagatagccacaggaggttccggacacctgccctggcctgagagcaattaacacccattcttcccccacttcctctttctctgcttcctcctttctctttaataaccccttttataatcaataaagagaccttgacaaggacactacttggtctggcttctctttctcgcccattattttcaggcttagtccaccttggacccacgaattactgaagtcccgctggccggggcattgattatagtttcagaggttcagtttgttatcatcatgccggggagcatggcggcatacaggcagagatggttggagaagtagctgagtcctacatcttgtaggcaacaggacattgactgagatactgggcagtatcctgagcgagcatagaaaacctcggagcccaccaccacagtgacaaactacctccaataaggacatttaaacactcacacaagtccatagaggagtggaacagaacagagccaacacctactcagtccccaattcagtgtgttcaggagagaatctgcatgtagcagcatgagggcccctactattcaggaactttggagccagcagtgccacacccacgtctgtgacaagagcacagaggatacattctttggtgctgaggtcaccttccagaagagactctgtgtgagcaatgggagactaaggggagtgacctcttagaccagaacaagggcattgcaaaggccagcctgtgaagatccctcacaaatgcagaggggaggggtacaggtgggaaggctaacatgagaccaagtgtggcaggccgaatctgccctcggaaggccttcctggggcatgcagtgtgctaagaagcccacgccagagccaagcaagagtcgggttggagggccaacctttgggggcagaagctatgtgcagtacgacagggctgtggcgacctcactgactaaagtaacctgtaactgcagagcaagatggagcccctgtgacctagggagcactcttgatgggatggagtgagagtacttaggtctcttacccaggactccagagtgtcataccgccttttcagctgacagctggggctcctcataccagagttaaacacacatacttggctggggtgaatgacagcagtgggggatccagctacagcactgtgccagcatgtgaggcctatgctatgcctcctgtctcctctgatacccaaaagaaggtgcttcccacaacccacattaccagaccacatgggaaaagggtccctgggaaatgtagttcagcccctccctgctaaccagcactaagccaccatccaggaccatgggccactgtcccagtgatatgtgggctctggtgcccccttgtggtgaggcctgagacttgccttgagaagccaggaagctggactgcacaacacacccctaaagcctggaaatgccgcttgggacttcagtgtccacatgcctcctgtgtctcttcacccttctgagcctcatgtcttcaggactgcagttcatgagtccagatctcaagtgtttccagtcctcttccgaaaatctgtagagaatacactgcgccttgttgtcaacccaacagcctgctgcacacttgaaaagtaccatgatgcttcttttgcagctgctgcccagccccatggagcttacacacacacacacacacacacacacacacacacacacacacactaaccccccactactcacaccacaacaccacactatagcacacagcacacacacgtatacacacactacacaccacaccacatacacacatacacacactcaccacactatagcacacagcacacacacgtatacacacactacacaccacaccacatacacacatacacacactcaccccatacaacatacatacacacactacacacacatcatacacacacaccacacacacatatatacatacactacacacacactacacacatacactacacaaacatacatatacacaccaaaccacacacacacatcacacacatataccacatcacacacacacaccacatacacacacacataccacacacacacacacacacacacacacaaaccacaccacatacaccacacaccacactacacacacacatacaaacataccacccccccacacacacagagcacattctatcagtccataaatttctaggcacaaaggaggtaaagaaataccctgtcttaacataaccatgatgtgattttctcacctaaaacagtacaaaatggtagcgttgtgctccacataaaaattccaggcccttagtactttaaggatctgtacatttccaggacactgcagccttctggaggcagggtccctgtccatctcatgtgcaactggctgtgcctctagcatctggtgcttgagggcacactctgtaagtgctcatcagatgagccccatgtcctgaaatgagctgtttccgcccagctggaccagctagtttctttccgcgatgcacttgtgctccctgaacagctgtccttcttgctctaataagctgtctgtctgctcctttggtgaaatcaacgtttatgacttttatctgagtagaagtcattccccaaatgattatctgcttctccaccttgactgtcccttaggatcacccgagtggctctgagaagacctggtccactctggagagtctgctgtgacaggggtgggcgtgtgggtctcaggtccctcccagggagccatggtggggagccgttacttggcccatcctcaaagccctggcagcttctagaagataaactgattagcaggagctactgctctggaggcctgaaatcatttgcttgacccagttttatggctttcaagtctaggcaacagctggagcccgactattaagctgggaagtgttgcctaattgagatacacaaggggttcctttaccagagtgaatgggggaatcatgctggcctctccgtcatctgtgtcttatcaaggaggctccccaagttcttaaagcaggctgggcctccagaacagacatgtttttattccttctacatctcgctgtagagtcttctttcttacagggttctatcagctaaccaaagggcgttggcctgcccatcctcacctgctgatttcagggttaactggattcactgaggccattcctgcagaggcaaaggctggacagataggtaaaactctgtcatggttcccatgactccctagcaggcacacggtacaccacacctttcttggaatgtcaggcagaaccataaagggatttcatgcctgtgcttactttacaaagagttgactatgccaggtgtcttcaatgtctctgaaaagaggaattggtcaggggagaggctgtaggtcaaagacctgccaggcttctgggagcttagagtagctctaaatgagagttaacaagacaatgagagtctcagttctagagaattacattgagcaacctggagaatatgagaaccggatgttgcctgtatgaaacacagaagaaggcaggaggttcctgacaccatgacatcaccctgctgaggccatgtcccagaacccaggaatctgcaagatgaccgattgtggggtttattttgctgtaaaatatgcatgctatgtatattattaatcatgttagtttagaactgacttcaatttccagcatcctggaacgaaactatgtatgcccattaagtagcattttcctcttcttcccttcccctggttctccacattctcatttcccaggcattgcatctccctaggccctctccattgctctgtccaaggtcctcactgctccgccccaagccctctccattccctacttccctgcctctcctcattcctcttcttcacaggccttcatcaatgctgtttgtctctggacatcttctccttccgtctacctggtagccagatctgtgtcctcatgactttgtgtcccataagtggattcaggtaacagcatttattttctgagtggcttttttcactttggcgtcgtcttctcaggcttcgctcgggtttacgtgtgttggaactgttacccactgccatttgtccatcccatcagcgctgtgaattatactgtgcacactgatggatatgcacctatttgctggtattgtttctgtcattggtcatgtagcagcgaacaaacaatacaggaggaaactaggctctcaagggaaccgggcattaaccgtgtgtgtaaatcctagctcatactgtgagcccataaatgtcttgcttcatatgcacaacagcttcgggtgagtaagggatgaaatggacaatccaggtgcggcacacactagacttaaaaaaaaaatgagaccctgtgttgaatggctctacacaaccactcttcctccaggtgtctacattctgccatgccctgatgcctggggtcctgtgctgaggacagcctggctcagcgatccctcctgacctgtcataacctgctgtaataatgggcttttcagagagtgctggtggcctgtggggtggggtagtggtgactctgagtggagaggaaacacttgaacaaaaaaagcagacaccataatttcctagggtgattgatgggggaagtatttttgtgtatgtttatcttattgattgtttaataaagttctgtttggccaatgaaaccagcaagttaggcaggactaggagacaaagaggattctgggaaatgtagtagagaagtagtgatccaggtcggaagtgacatagcaaggagactcatatttgaaccaggagaaataggaaatgtctcttttccccttccttctccagtggcggaatgtgagccaccggcaaggagggatgccaataaggcgtccgataagataagtcttataaaatatatagatttatgataattgagactgagctaacaaatgagaattctggtcattggccaagcagcattgaacctaatacaagtctctctatgtattaatttgggccctaactcgggtgggcagctggcgtaaagcgcacacgtggcggtggggctcggaggctttggcggaaagatttatcgaggtgatggaagagcttaattgtttttaaatcatttcttttgagcacttggaaacatcccagaagtaaatggtaagttttagatagcagaaagctcactctggagatagtttctgcaatgctggccacgcttgctaaggggaatctgagagcagtgagggaatggggaaaaggcggcatggggaacctgcgtgttttaacagtgtgcagtgagatccaggagtgtgggaacatttttcgctgtgatagttttgtttatggagttgctgcccagctccaggagagggaggccaatgaccgttggttccccccgccccataggaagtcattcttgagttctactgaatgagaataggtgatgggagtctatactgtcttggcactggacacactggacacacaggaataatggccttcagaattaagtgagcgcgtaagagagactggatgggaagcaggaggagtttactttggttcactgtcttctggcccagcctcctctcatggtggggaagtctgtaggaatgtgaggtgtctgatcaaatgttgtcagaaacagtgatgggtgaaggctggtgctcagcaggcctcctctagcccaggaggagctagccacacaggaaggttggctcggagctgaagagtggaatggaggcgctgtaccatgctccatgaaaagtaaggagtgtattataagaaatggcttcagtgggaacccgttagcagaggacattggtaccagtgtcatagggaggcctctggccaagataaagtctgcatctcagacctgctccagtggcatgctaatgacacaacacaaggctcagcaagcctgttgttatctcccaggcccttggggtggggtgtagtctctctgcatcctgcctctcatctagactttttcatcaggaccctagaccccagcctgctgacatcctgaggtctggtaacatcttcaacaagcgatggtgtaagtgctttatagtgaatgtgtgtgtatgtgtgcattggggtgtgtttgtgatgtgtgtgtgtgtgtgtgtgtgtgtgtgtgtgtgtgtgtgtgtgtgtggtgtgtgtgtgatatgtgtgtgtttgctaggaattgaactactgacctatatcccaacctcaagcttgccttccttccttcctttcttccttccaccttctctcttcttccctttctccccccctctttcatctttctttccatccaaactgacttcaacctgagctcttctttctctcctcagcctcctgagcagctatgactacaattccacatattgtcagccctgtctgttgaatgtgttttgtttgtttgtttgtttgtttgtttgagacaaggtcttatgtagcctaggctagccctgagctcactacacaaacgaagctggcctcctttgagtgggccatacaccatcatcaccatacagccggttgactattttttgcaatgggtaatttgctaggaacttcattcttaaatatgtgtttgaggtcattctgttttgtccctgttagttcaagggacacctggcaagactgaggaacttgcctaaagggttgggcaccaggctcaaaaaagccaagtcgtcattgctgaagcctgagtcaccacacaataacagcgctcctcatcagcccacaacttctggggagactgagaaagggatagggctttggcaatagtttcccagagaaaaggccacactaatttttttcctgcctcttacactttggccttatttattttgttgttattactttggtgggggagaccagagattgcacctcatacaagctaggtgagctctccgccactgagctgacatctagctctccattcacgatgcattttgaagcaatgtctctttaaattgcccaggctatccgaggcctcactcgaagcccaggtaagccttcaacttgattcctcctttctcagtctctagagcaactaagattacaggcttgtaccactaggcctaggtttgcttcttaagctctatactaaaattcttgcttcctatcctgtagttaaaatgcacaattttgttcttgcaaaaaaaaaagtcctttaaataaaatgagccatcaccagactgttatggtattcttataggtttattttttccatatcatatgagaaatgccagcacattgcaaagaggctaagatgaaaccttccaagcaagtcaaaatagatcttattttactacttttaattgacaaattaaattgcatatatttgtagagtaccacatgatgttagaacacctctatacacggtggaatgctgaaatggtgacaattaacccatctgtaaccccaggatttattgttccttcctttaaaatcttcagtggttttgaaacacacagtatattgttattaactattgctgtcacgtcttgcagcaaatcattacaatctatttctcctgtctgacatttgttaccctctaacaagtcttttcagtgcaaagccattagcatagttatttgttgcttgtccattcaacttttcctcctgtgtaaaaatgttacaaaatgccattatcagcatctgtagttctggagtctgcaaggacatcaggtcattaatgtctttgtgtcactttccttttgtgctaggtagatttcattaacaaaatgaaccccaattcatcccagtatgcacagcatgggtgagctgatgctgggctcagcatcattgttaccacctaggtctcaactaattgttctctaactgcaactgaggggtggcaagccaggaatcacacctcatcaattttatcaggccccttgtgtttccataataagccaagcagcaaacaactcctgtctaatgaactggactggttcattataagatgacagtatgtgagatttatgtgtggaaataattggattgttagaaagaaaatttggcttcttatgaggaagcactgttaatccaggctgcagaatacactcactaaggacacttttagtaccagtgatgggtttaaccttgacattcaaactcaactggcctgctaattcttccattagcatattttttgttgtttgtttgtttgttttgttgttgttctttgtttttctctcatgatgctgaactctgggtaagatattctttctgaactacatccccagccctacaagcatttttaaagagtgcactccaagaaacaggtgcttatttataaatttatagcacatatataaaaacacttattggccctactttatatttattcccattttgctcagtgggaccagcaagctaatttgaagaaaccctgaagctgagatatgaaaaaaaatatttttttgcatgaccttactcttgctcattttatgagctggtttggtcagggaccttagagtcagtccagaaaagccaactttgcagctatcttatttatgaagacagctgcaatgatctcaacaagatatgaatagatggagcaccccagtatatgagaaaatgataatatctgatatgtaagaatccaagcatttcatataagaaagcttcaaaattgacaattttgggaaacaaggacttatgtcagaaaggtctaataaaattaaccattcacaatgagagtaggaaccttcttacctacaagtgccagaggatgtttctaatgtctcatgatggacagtgtggatgttgactgtccccgagggcccagtccccaaggcttgactctgtgtctagggaactgttgggagatactgggactgccaccgataagcttcatttcttttgttttccttggatggaaatatcactagtaaaggcgcagctctgaatcaggggagtctggaccccatcactcagagttttcttagctcttgagttttaaatgccagtggcccagcaccaatcagctagtcctacagccagggcttaagacattgaaatcttagcaattggtgttgcagccaccccacctcaagctgaagccagtaactctccatggctttccagaactactccagcagccaaggctagatgctcttccgtggcctcaactctccatgatctctgatgtttacttgcattcttggctctctgtgactcttcacctctgcactctgttctccactgtctttcatcttctcagtccttagactgtccttcttgggctcagctctttctgcatcgggatgctctttggagctcatcttctgtctcctcctgggctctgctaatgctggctacattgggagttgactgttctgtatgtaataagtacagcacactccactcatgacgaaagttcacaaccacttggagaaggacttcttggatcttaagctgcattgtgaggaactgctgcttgggttaccctcagtgaacctaggcagaatcatctcagggtcatctgaactagttatgccagtgcagagcctcctgaggcaaagcataggtgtgtgtgtgtgtgtgtgtgtgtgtgtgtgtgtgtgtgtgtgtgtgtgtgtgtgtggtgaccataaaggtgatttctaccaccagaaagaagtctcttcagggagaagctgattttaagtcttccttgggcaacctagaaggttattttttgtttgtttgttttgttttttatgacagtgtttaagagttgtgtgcaataaagatttaagatgcagtacacttctaagaatacctaacctctagccagacagccctggagggtcaggtccctgtgctcagcaccttgaggaggtggagcccagtgcaaggagttgatcactggggatactcggccctcccttctctcctttccttattgcctgctatgaggcactgcttcctcatgaactcaaaaagcagaggtgaggctggagcacaggtggatgtgtgtgggaaagtttaaaaagccagttaccctcattttgccatcttgcacacctccaccctggtgcatatctttgcacacctccaccctggcatacatctttgtacacctccaccatgatacacaactttacacaccaccaccatggtacacatgaatgtcttggaagatgctctcaaaggtcatcaacaattctgagaaggaaatgccaagtcctcatcaggccatgccctaaagtcatcattcatctcctagctgtgatgatgaagcacacttatgtcggcaaatttggaatcactgacgacacagagctgggaaaatcgttgtgaacctcatgggaaggctgaactagtgtggaatgatcagcctgagatttgctgtgtagctggaacatttaatggaatccccaataagtggataggtgggtacagcaccacacagagagaactctctccaaatacatttccagagttaaagcagctccagacaaaagaacttctaagtggtttgtaccctgaaagttaatgggagtgttttgacagttctaacagtttgtgtatgtgtgcattcttaaaagtttttttttttttaacaaaaaaagccataccatctgtaaaaagaaattatgttatttctttctgatttagatgcccttgcttctttgtcttgctaagcactctgcctgggatataaattgtttaaaatgcacagccactttgcttagagttacatgtcataagatttttaaagggacatacaaatttattgtaattttgtctgtagtatataaaatacaagaagccataaattgtacagtgatatttatataaaatatatattcctattctattgagtaaagttaaatgacaataaaagcaagcaatacttggtgcatatggaagcatccttattttgttactggcctaagttacataaaatcagaaataaaatatgagttgcttgagcaaggaaaatagagggactaaccatagttccactggctactgaagccaggtcagatgacttcatgaacaggcaggagttagacactgattttattattttttttcctttacttattaacccatacttgcagaggatttccctgtcaggcatttcccagtgtcataaccacaatcccatgttagtactgttctcgattttccacgcttgttggtgaggaaggccatgtatggaaaatccctgtgtctatacaaaagtatgttctgtaccaagggattcaggcaacaactacgattaaggaaatgctccacacttccttcttttgaatcatccaacggaaacacattctctttgctgagcattgttggagaatctgggtacagcatccttggtgtcaccctggaaacccttcatcaacaaaccctgctgggagtgtttcctcctgggatagttcagtgggaacttcaaacacccgtttggtattctcctggtccaatgtgactgcttggtggcatctgtggtgaaatgtcttctccaccttcagttgtatcagtcacatcttattcaaccggctgcttgttttcagaatccccaccttggtttgaacttggagctttgtgatctctcctggatttagagttcagctgtccatgagctggttcaaatctgtcgttatcttcttgcgtgacagactccgaggaaataaatcccatattctccttgtaagggaaagcaactgtctcatatgtaggacttctaataactgagtgatgctgagttcttgaaatatttctgtagttcacttccatgacagtctcctttagtctattgttaaactttaggagacatttctgttttgggacttttctatagttcacttccatgacgggctcctgtagattattgctaaacctaaggggacatttctttattttgggacttcaaggatgtctttcacaattggaacatccaagttcttctttcctcatttttgaaaatggtttttcattgtgtttggttcttttccattttcaccaattttattagttgttttttttgcgggggaggggtagttctacttagtaatctacctgaataagtatacacattgtccccagtcgatgtcattccagcagtgtactcccctgaccttattctcacttttaaatacctgcagcctcacccaaggaccatactggacaactggttttgagacatctgttggttacactggcacagcaggttgcattcataaatgccagtaggtattagtctatgccatcttttatatcaaatcaaggacatactccatttcttgacaggggcatgttttggcattctttgctttcagttgaagacatgcacttttttcttttatgtccatgcagcccccaaaacagtcatttgaatcagaaagcatgctggagaaggttagataatatgctcgggtcctatgatctttctgtacttgaactttggaagtctcattccatcaatttattcaaaagaagacattagcactgattccactccatcaccaacatccataccagagacaactttgtcttactttggataatcccaggtcagaacattaagtatcaaaactgaataaacagctacattgtctcgagcagtaagcatattccctccatctttgcagctccttccacatggagaacagaggaaagagagcatgtctttgcatgttgtctttggaagggacatgtgattggtagctgcagagggttttctctaaggtgagtggcatttgtgttagacaagtactggagcagacatggctgtggtgaaactatcaaaagagactcctcctccctaagtctgaacctttatttttcagatggagcacttttttcctctgcagatccttagaagctgatgaactcacgcagttgctttgctcactagctgcactctgtatctgggccagacccatttttttttatcgtctgcttcagtgactgtagtgcattctgctatttttgccatcatcttgtagctccattcagaatgtctttgcatcgtcaccacctttcccccatcattttttttttggtgtttatacgaatttcctcaaaattaagttcatcaaaaaaatgtatcatgcaccacttcgattggagaatattcccggagtaaaactggaggctctgtgaaatctgtagtccttgaaaacatgcattactgtcttagatagttagggttttattgctgtgaagagccaacacaaccatgacagctcttataaaggaaaacatttaactggggctggcttacaggttcaaaggtttagttccttttaatcatggcaggaagcacggtagcatgcaggcagacatggtgctggagaaggagctgagagctctacatctggatctgcaggcagcaggaagagagagagagagagagagagagagagagagagagagagagagagagaggagagagagagagactgggtctggcttgagcttctgaaacctcaaagtccacccccagtgagtgacacattacctccaataatgccacaccaactcccacaaggccacacctcataatcattttggataactccactccctgagcctatggtgaccattttcttccaaagtaccacaaagaccaaatatgctttgatatttgagttttcaaatagaagctgttgttgaaaagactttcagagtgattattagttcaagttaaacaggctctcacatcttcattaacacctatacttaaagcagtatcaaggctgttatgataaggagagaccttggcagatcccatggcgggagaggttggccaaagcagagggacaaaaatgtcaggcagacagagcttaagtgagaagtcttattaggaagggatggaaggggtaaggaaagagaaaagaggtagagagacacagaaataaagaggacaaagagaagagggagacaggaaaaagtcctgtctgcccaggggaacagctggaaagagagagggaaagagaggagtgggaaagagagagtggaaagagagagcagaaagataattggaaagagagcgtaagtgggtggcggtctttcctttaaaggggtcctttgcacctgggctgacctgagtgcattcttccaggtgacaggagcaggccagcataatgcctgaatccttacaaggactactgacaatatcttcttaaaaataaaagttaatttggtgttttggtgcacaaatgcatgagaacgtctgttaaatgggccagtggttaaaactccaatgtccagcttcagcattgtatgctgtcctgcattgctgtgatgtagctcaaatgcccaggggtcaccttaaaactgcttcttgcatgccttcaggtcttggctatagcattctcacctttttctggagacagggggtgtgtgtagctgaggctggccttgaactctagatcctctgtgtccttgctcacacaccttcttctgtagcccgagaactggtattaccgatgcatgccaccacggtgtattgccattctgactatctttagccagttttgaggtgactaaaattcttatcacacaaacattagcctgtttgacatcaggggtttaccaaagtgatgctattgacccagtcatgtttattcatatgataatctctgggtttcactctgacttatagtctacattggagctatttaatgatcaattattaaacaaccttgttcatgctcaaatattgggtctttgggcaaacagttttacatccacaaagaaagagcctgggagacaataccacattaatgagcaaactccatgggctcaggctgtagtgtgagtggccttggggactgtcttacctgcttttctgttgctttgataaaattctctgatcatcatcagcccaggaaggaaggtttatttcttcacagatttccatcatagcagcaggacctcagggcagtcggtcacatcgaattcacagtcaagagacaaggaaagatgaatgttagtgctcatttttttttttcctatgttatgtgtccaggatctcagtttgggcagtggtaccacccacagtgggcaggtcttctgaacttagttagcctaatcaagacaacccccctccccgcccccacaccacaggcatgcctgtcttccagaagcttctagatctcaccaagttgactgttgacatgaatcaccactgggacatacatgctttgcaagtggacatttcagatttaaaggccctgtaaatgacacctcctcttctttctctggtctatgatgctgacagtgcctagtgacatctgtctctcaaaggactcaaagtgacgtaaaagagtggcatggctctacttagcacagactcacttgtgctaaagaagaatggagggggtggcttgttgggagaatgacgcacccagctgctatctctgtctcagcactattactcctttgcctgttcctttacttttgttggttatctattcaccctgaaacttagcaacttaaggaaaaaataatgatttttaaaaacatcactcaacatcatttctcattctccatctcctgttcctgtaggtgtttgctaggctcagttggatggtttggacttggtgtctcttgcagcccaatggtgatggtggtgcccttgctcatacacttctttggtgatgctagtgtcagccagaagcttgtctgggatttggacaggaccccatccctgtggtttacgtgtctctgaagcatgacaaccgagtgacagcaagtctcatgagactgggtgttgaagtttccttcttctcaaggccattctgtgctccagggacacaacaataagctcggaaggaaagaagcaagcacacttaaggcaaggagatttttacctgggtctgggtatgggagtgaagatggaaataattctgcttctattagctgagcttcttctgggctggtacggtacctggactgaggaagacaagcagtatggcagttggtgatgtcttacctctttggagacctgagggctttatctattcactcatccattctttcactcactcagcgagtttgccaggggtacattttgggctggataatttttatgtcaatttggacagaagcttgggttatcggggaagaaggaatcttcattgggaaaatgactccataggtaggactggtttgcagaaaagttgatgggggcattttcttgattgatgattgatgtgggagctcccagctcactgtggtagtgccactcccgatgatggtcccaggagttataagaaagcaggctgagcaagccaatcagcgagtagcaccccctccaacacaccccgtggcttctgcttcagttcctggccccgggttcctgacctgcctaagtccttcagcgatgggctgtgatgtggaagtgcaggcaggaagaatcctctcttccccaagtggctttggccatgggattttatcacagcaacagaaaccccaactaaaacacaggtgctgtcctcatgggtgcatgatttaatataaagctggtccatatgactctcagctgctcagagtgttgtgtgagatgaaaaacacgctagctgccagcaagcaagtaaaactgccacacaggcgaggctagcagctcctgtcttcagagccttcagcaggctggccttggggggttggttggttggaaggctttgttgaggttctgcctggaggagatttgctgcaatatgcccgcctcctttgaagctgattgctagtgagttctttccagctgtctctccatgtatcccaaaggaggtcagactgcagttagatgaggacagtaaagcaatcaaggtggaggtgattttagggcctgtgccagactggaaatactgtgtgtccttcattctctagctcttgcaagcaccggctcccagggtgacactttcttctcatggagcagcaccagggaagatgtggatgggccattatctcacagttcaggagaatcagagaggaggaggagagggtgagtacagtccgtgtggaggaaggacctcagttatgtccacagtgaagatggtaggtgccagggctgagaaatcaatatatgtaggtgacctcatgccagggtgaggctggggaatcgggtacgtaggtgagcacatctggccagacccatgtactgaagttccctcagatgcttgcagtgtgtcagacaggccccaagtccactgtgcatttggggggacccctcaccctgcgtattgcttatgcttgggcctgagatcatatgtaagcttttgggtcaaaactagactcctcagtattgggtgacccaagagacaatctgtaatccgtaaggtcgagatatctttattgagataaataccagccaaacgcaaaccagagcatgccaggggcagccgagcagccagtccagaaaggggcaggagaaggggcttccatatgcttgctgtaccttaagaacctatgtcgagtcattctgacctcaccttgaccacaccttgacaggcgtggccaggcacacctgaagccagcctctaaaaggcgtggcttactgtcccctacacctcagggccaaacatgccgccaaactatggctagagacagaatggagtggggtccgggtcagggcaggcaccgcacagatgccccgagcctaaacaggaattggggctgacggggaaacactcctcaaggggtccatcctctttcccctcccttgatgtggcctctacagctttctggtcctggggacgtggcctctacagctttctggtcctggggatgtggcctctacagcgttctggttcctggggcatgttcaccacctcatcccttcgtctcccctgatctctcagttttctccagcatttgctaacaccaatttctgactttaactcttggtcatcctccaaatgtcatctatctgacccttttgatctacctcgacttccctgtgccacctaaagccacaatgccctgctggattttactttgctcatttgctacttagctcctgagagcctgactgcagtgcccctgcgctgtgtggtcctgaccaatcctcacctcctgtgagcctgtgcagcacttggaaagaccttgctgctagtctatccagtgttaacttcctggtcctaactgacagacacccagtttctttaaaggcaacaccacatcctacgagagacagatgtctccagttcccctagtggctgaggttctcgtgacactggctgctctacccaggtcctgaggagaagcatgagacactgggttcctgataaatccactggaagccagctgagtcatagctgactaggagcttcagcccaaagggcctgatgctgcaacccatagtccccagagggcacgcccacatccacgtggcaccatcacagaggatgatggaagcctactaaggcttgtgttgtgtgataatctttttgtacactataaagatgagtctctgcctgacataccttttatttaaagattttacttatttattatgtatacaacattctgcttccatgtatatctgcacaccagaagagggaaccagatctcataacggatggttgtgagtcaccatgtcgttgctgggaattgaactcaggacctctggaggagcagtcagtgctcttaacctctgagccatctttccagcccccactgacatgccttttgattggtttactaaaaggcagagagtggccagtagctaggcaggagaggataggctggacttctgggcagagacatatctttacagtgtatgaagagatcacaccacagtgggctcccctcc

SEQ ID NO: 3 - DNA, 77562 bp, Cricetulus griseus
  >scaffold_1 dna:scaffold scaffold:CHOK1GS_HDv1:scaffold_1:5717943:5795504:1
  misc_feature 9468..9567: /note="n is unknown"
  misc_feature 76550..76649: /note="n is unknown"
ccccaggtgaagtcactggccgtgggctcagtgtatattgatagaaaaacatacaaaagtgtcattttgctgaaaagcattatgtaagcgattatgtcattgctgtgttttctgcttagtcatgattccccagatacctggagttcagcatcatcttcagctgactcacagtccctgtatgtctgatagctttagctcatgacagatgtctataccgttgccatgtcgtctaagcctttctatggcctctatgaccttctgtccctttcacacacacgctcatgtgtaggtctgagtgtggagtcctaaggctgacatcaagtgtcttcctccattactcttactcactgagacagggtctctcagtcaaacccagagctcactgattggcctagccttgccagatggattgctccacagaacctatgtctctgccttctaattgggggaattacaagctggccactaccagagcctggcatttacatagcttctggacatcagaatcatggccctcaggtatgggcacatagcatacacttgacacactaagccatcatgccagccccattcccctttcatctttttactgtacttttactggcagttttacctagttatttttaacgattttgtgttttgtttttatttctcatattcatactatggtttatgcatttttaaattgggcaatctttttctttagtttctttttctcccttcataacactcttctctactcttactccttttatgcagccttacttttcttctattttcccttcttcttcttacattcatttattatttctatattttatatgcttctgatgcctcaagaagaggctgcttaaaatgtggataaataaggagaccatcatgctaattaaaataaatcagactcagaaagcaaataccatgtttcctttcatatgtatgtgtgtgtgtgtgtgtgtgtgtgtgtgtgtgtgtgtgtgtgtgttgtgagaaggcaagaagagatattaagtatgagggtatgatgggggaggtccttctgtgtatatgattgtcttattggttgataaataaagtactgttggccaataggaaaacaagataggtgggactagagtcaaggaggattctgggaaatgtaggagaatgcgcagagtcaccatgtgagcctgggaagacaggacacttaccgctgtgtccaataagataagtcatataaaatatatagatttatgataattaagactgagctagcagatgagaaaacctagtcattgaccaagcagcatttgtacctaatataagtctctgtatgtacttgggaccttaacatggcagcggggcagaacttgggcagcctggtggaaagcgcccacatggcagcaggactcaggcagcttggtagaaagacttattgttacaggggtgggctgaagaaagtgtggtagagtaaacaaaagaaggaagctgaaggaagaactattttggctgtagaaggctactataccaacaatagcatgctaggagcatgggggaggggtaagaatgaaacagaagggcaactgtgtgtgaaaatgacatagtgaaactatccctttctatgcctaatttaaaataagcaaaaagggtcggctgctccctgggaaggccccactataaaactgggagagagagagccaaactagcagatgtgcaggccacagcatagaaccacaggaggtatgacaaatgaaagctgtgtgactcctccagaggatcccaactcctcaatctctctccctcaaaggtaacaatgaaccataataattcaaaagttcaggagctggggagagggctcagtggttaagagtgcttgctgctcttgcagaggccccggtttcagtgcctagcacccaagctcacaaccacccacaactctccttccaggggttccaacaccctgtggcctctgagggcaccaggcttgcacacagtgcacatccaaacatgcaaaccctcgtggacattgcattttccctgagggcatttttcccatattatttattgtctcctgatttattttttgttttcaaaaggctctttagaagccagtgaccctgtccaaattccactcccgggtaagagcccccaacggtcactaattgatctgtttagatgtatcttttatttattatcctcagtgctacctcccagtctgagagtttccgacacatgactttttatagaatactttgacagtctggagtgaggagcattgtctttgtgtgagacgtgagctggggagagaagaggttttaggtaatcttttggatggagccagtcaagcaataagctgaaatataagaggaacagcattcctttctacttctgttaagatcatcctttgtcttcaggtcttacagttcttggggaaagtgctttcctgagagtcactgctcaggaagaaattgcacgaagcccagggaagcaagtcacacaccaaagacagtggtgtagacggtggagatggtactgagactctgaggacagtggtgtagagtgtgatgagctgaggctctgaggacagtggcatggagcatggagatgggctgaggtgtaagctttgagggagaatgtctgggtgaatccctttctagagcctttttcttaaagtcccctagaacagtcaggattttgcacttaatgtttccagcaccagctgaactgctggtaggtcagcagcagacgctggagccagctgcagcaggtgttgcgcccagctccccggggtcccacctgatgaccttgggcaggctgtgaagcatcatttaagtcttggtttttcatctgtcagatgagtgaaaattcatacgtgcattccttcactggactaccctgagtgttcttcgtgtaataaacctcttcccgctgtggctaggaagtgcatgagaagctttccctacatggcaacactaagtatgaactctacacttttaagtcatggtgatcaggaaaccccgttgtagataatctacgaacccagtttcattcagcttcttgattaattctcttcagtcctagtttgaatgtgtgctgtgtcacctgcttagccattagtacatccaaatggcacttgtttacatagaaataaagagggactgtaaatgtagctcaatgggtagggcatttaacatgcatggcactctgggttcacgccacagcactgcaaaaacgagaaacggtatcatgcatctgtgatcccagtattgggaggcagggtaagatgatccaaagttcaaagttatcctcagacacattttaagttgaagtccagactgagagatatctgagattagaaggaaggaagggaggaaaggcgggaaggagaagagaagggcgggaggggagtgaaggaaggaaggaaggaatgaagggagggagggagggagggagggagggagggagggagggagggagagaaggaaagtaagagctagctaatgaatacttgaaagaaatcaggttaggctgttctggggcctggtttgtatcagtcccacgctacaggggctatctattcccgactgatgtctttggggctgagatcagagccagctgaatagccccgggtccatccctgagttgggaattgtgctggaccgggacactcctagctacccaacagcgataaagatgagacacagacatcttgtcatttcaggagggctattagtccatgctggaaaactggagtctccggtttattcaagcatcctcttaagtagctttccaacagtgggggtgactatggaagatatctactatcatgcataaagctgatatcaaatatatccttttaaccctagtggcacacctaaacagtccctaggcatgtaaacaaaaacctcagaacaggtttgggctaggtctgttgttatgcaaactacgagacattctccactgaggccaagcaatctggcatgaattagctggacatcctaaagactatgtgagattagagctcctgggatagagtttgaggccagcatctgaaagaccataattgatatttttcgggccccgacaaggctgtaactaaaaacaggatataacacgcaaacactatatatatatatatatatatatatatatatatatatatatgtcctactttaatatgtgccactgttagacacaatgcaaagtggagtttgcatggagcaccaagtgtgtagtgagggtggaagactcaggagaggcctctcgggtatctgaggatagagtgtcctcagccagaatccttggatttgccgtgagcatgtgtttcataagtcaaaggtggcaattcagtgaagaccaggaaccttccagataatgtagaacacatttctgaatttatataatatgttactttaaatgctaggattcaacttcccaatgcggtgacagacaaagtcaccaagcatgaagtcttacgtgggtgttagctgctgatactttatggtaaatctgtgttcagtggggtgtggtctgagcttaggagctgaggaaggatgagttgaggggagctgggcaattaaagcaattttgaggagtcgtaggcagatgtaacatgctttattctctctaggtgaagacagactgccacacaggcataagcaggtgcccttcgggtttgagtggtatacttgcatagaatcacaccaaggtgtcactttctggaaatgattgtataatggattaaattatggcttactcagggttccctatatatccaatatcagtcctctttagctaacagttccccggtgtccagtgttagaagttcttagcactctgtgggtatccatcttgtcaccatattgtctaaatgttcacccaaccttaccagctttatgtcttccacggaagagtaaaggactcccttacggggcaaggtccactgagctatgtgactgtagacggaagagaagtgactctactggaaggcaggagccatgcttagcatggcatgtgggtaaacaggaagttgctaggatgacaatacatttgacaggaagtcgctatgatgacaatacatttgacagttgccttggagaattgtatcatttcaaatctttcgactaagttaaaaaaaactcccaagtagccgtaccagataagtatagtcatgaaaaagtaggctgcagtctcagtgtcttggtttcttttcttgttgctgtgattaatgagtgtgtacatgcccttgcacacacaggcatacacacacacacacacacacacacacacacacacacacacacacacacacacacacacaggatgaaggagtctattttggctcacaggaggggaggacagggcactgggtcatagggcatcttgtcctgtgacttctgcaatcaggatgcaggaggcggcagatgctggtgctcagctttgctttgcctttttattcacaactccagccatgagatttcaacacccacaactagaatgcgtcttgcaacctcaacccagtctagaaacacttcatagacacacctggagcttagtgtccccggggagtggcgtccagcttctgtaacacctttgccaccatagttatcatctcaagaagaaagataattaaggcagtgaaacttatcataaataccaaaaccacacttcatattctccatcagccttgatgtgagaaacgctcagtgtgacttcagccttgggttagagctggagataccgtgggttgggcttcaaggcagtgagactggctgccagccccatgcctaccaatcagtcttcaaatgcaaaacttgactagcatgatatagtgctctatgtatgcccatatttagagggtttgaattacctggtttcagggtttccctcctccctgaactaatgttttttcttctttaggtttcttcctattcagaactacactttgaaccatgaacttcctgggatgttcttgttcaaaacagaagcaaagtctggtgtttgtgtttgctgtgggtctccagtttgggggacaatgtatacttgacaggtcataattaaatatgaaaaacatcacctgctaatctaggcccttcacatgttaataaaaatggaattggataaaggcactcacctactactatgttgatttaagcgtgtcaacatgctacataatgtaatatactaattgtaaatgtagaatgtcatattataaaatcaaagccatattgcaggttaaaaggggaaagggattttatactgaatcatagggaaggaaaggttatcagaatgttgacttcagctcatgttactcagtggcaggtaattagttatttcaaattgtattctaatatcagatctcacagctttcattataataaatggggaagaaaagttatcactgaggtgcccttcagcaaatgcattttagctaaatgtcacacttgcaatgaccttgttccgacaggtcattgttgtggttttaatgtgaagtgtccccgcaggctcgagtgtgaacagttgctcgctggtcagcgaaggtctggagatgggggacctttaggaggcagctttgctacaggaagtggtgcaaagggaggcgaccttgagttcctgttcactctctcctgcctggctgccaatctgcaatcagctggccttcctgcctgcctccatgccttcccagtcatgaggggtgagccctttgagctgtcacaaaaaaccatacattgttccttggtggggaattggtgacagtaagtatagcaatgagaaaaataacctatggaccattctaatagagtgaaggctgagaaggatggagaactggtgggaagaaggggcatagggcattccacctcatgagccgatgcgggctcagcaagtgcaccggtgttcctaaaacactgcagttcctcggcagacttcaagagcctgagcttgcacgccaacaggcaggggcatgtttgagcatcaattagctgcacctgaggaattaattgactaataaggcgtgtccagtcaatcaagtccaaggtggtttttatgtccttcatgggggttctctgggtagtaataaatcattaaagcatgtatggtgtggataagtcctacagaattggagcagaattcatgcagagggtgggaaaacattttaaaaacagcttccgtctatcaaaggatttttaaaacataattgattcgatcccttatcttgaattgtgtttaatttcaaatgtgccagttagtattgaaagggatttcacaacccaatagggttggtgacccactgatttagttgtccaaatgttaagagcatctcagtgtgtgtgtgtgtgtgtgtgtgtgtgtgtgtgtgtgtgtgtgtgtacatgcatgtgtgagcatgtgtatgcatgcatgttgaagcagaagacaatcttaactgtgtttctcgggtgctacacaccttttttgagtcaaggtctcactgattcaaccagtctgactggccagctcctggggatctaccactttctcagggctgggattgcaagcacacaccaccataactgacatttttttttaaaacgtgggttctagttttgaacttgggtccttgtgcttctaaagcaaacacgttagcagctgaactgtctctccagtccccctatctactcatatatatatatatatatatatatatatatatatatatatatatatatgtagacacatatatatatgtggttgccacaacaggcctggcatgcttgactcccacaggatgatgactaacaagtgtgacaaggcatatgagactgagcagatggttctttggcttcattcaggggcctgtacagaatgaggacatcactcttatttttatggttcactgttggcaagagtggcgtgtttaaacaattaattattttcaaaacattaaatttgtatcagtgggaaagctaacaataagagtagaatataaatcctatgaagctaagggttcagtgtcatccagacacctagccactacctaatacacaaaaagaagatactcagtaaacttttgctgaatgagtgatgggtcaatgacaacagcgtgggttcaaatgcactgttagaatgtaaatgtctcatgtgtgcacgtattggcagcaagggcccgcactttccgtaagatcttggaaggaactgtgagatgagctgtgagcctcagctggaaggcctgagggaactagctgttcagcaagcaggacttgagggcctccatgaacttttcaaccctaacatctgatctcaaaaatctctttcatgtcaccctgagtttacacttcacagaacagttgtccctgaagcctcacttcctacaatgacattgaagcatagactgtatgaactagtaggagccaaaaggcagcctatgagctcttcacaactgagaatcttactctaatgtagaaagccccccttactcctgtttttctcgaaaggccaagccaccagaacagcccccacagcaatccacatgttgggcatttctaatgggggaagtcctaatatatatatatatatatatatatatatatatatatatatatatatatgtttctcttattggttgatgaaaacactgtgtggctagcggcaaggcaggaaggataggtggggctaccagaggaggagaattctgggaagtgtaggcagagaagagtcttgatgtgaggctgggaggagaggtcgggtcaggtgttctccagcaagccaagaccacatggaaatacatagattaatagtagtgggttaataattaagacagagctagccaataagaaaccctagccactggccaacaattttataatataagtctctgagtgttcatttggggcaaggcagctgtggaactgggcaggaatcctgtaacacatttccatggcagaagaagatgaaataggctgtaaccatttgtagtccatagtctcctgtgcccaatcacattacatatgtatatacatataccagtgtgtgtgtgtgtgtgtgtgtgtgtgtgtgtgtgtgtgtgtgtgtattgaccgagtaactagtggctggcacttagaagcactttcctaaggtgcggttgcataaaacatttcatgttcacattaaaaaatcattagttatagttgtataatgggcaagacacctgtatttacaaatggaccttggagagatggctccgtgagtaagagcactggctgctctggcaggaatccagttggggttcccagtgaaagaccccgaagggatactttcgtagagggagacccatacacccaggaatcagcgaggccacgaactggatgtaaaaaacaagaggctttattggagacgcaggtacctggggcgacttagcttctgtgtggctaagcgcctcgagccaagggaaaaggggtccttatataggaaaaaggcgcaagctaggagcagggattctattggataattctaatgaggcattatacagagctnnnnnnnnnnnnnnnnnnnnnnnnnnnnnnnnnnnnnnnnnnnnnnnnnnnnnnnnnnnnnnnnnnnnnnnnnnnnnnnnnnnnnnnnnnnnnnnnnnnngtgctcgttgctcggccccagcctacctggtgctcgttctcgggcctgcccatctggtgctcgttgctcggccccagccccgaggctcggtgccaggcggggcgggccgggggcgcgagccctgccagggtgaaggcttgggaggccccggcagcttcggggcagggggctcaggggcatttcgagcgggtctttcaccagcacctatttggtggctcacaatcggctgtatccctggttccaggggaatcttatgccctcttgtggcctctgcagacagtgcacacatgcatacatggaggccaaacagtcacactttataaaataaaaacgaataaatcttaaattttcttttcttaaaagaaagatggatctgtgatgatgatatgcttcagaacacaatgtctgggagacaaagcctaaaaagcaatactcttaatctgcactttttttttttttatgtgaaaggtcttacaaaactctgaaactgaaaccacactgaaccaccctgttaggtctggcttgtgttgtgtgtgatgagtgtttttaacatagctgcatgttatccatgtgtgcctggtcacgatcctggtcttccacaaaggccgagaacgagggagtgatgggagtcaggcaggacatgaggaagcctttgaagttggaattgaaactagccagaacgaaaatcgagacagaaggaaggcctgggccctggatatggctctgtaagaaggggaagaatttcccctacccatcagctctgttgaacttcagtttgtgccttgggacaagctctggtctcctgtttttctggatggttcttcccttccttggtcttctcacttaaccaaacacttgggccctcatgcgaaaggcctctgttaaaggcgcagactccgtgcacactgttcaaccaagcatgcttcatatctttttaatcctattgtatagtccaaaggctaaagtcattacaaagctttattattcccacagcgagaacaagtctcatccttgaacttgaagacagaaaggaaaaccaggtgagatgacggctaggcctctgtaagtgcctcattatctcagctgaggaaatggatgtctttttgataattcaccactgttctccagcatgagctctgggtttcatatttattaacacttttagagttgaccttcaagctggctgacagatttccatagtaatgtttaacaataagaaataaatcgctatagctgtcaacagtgggctgtagattgttcgtgctctcatgtccttcagtgtatttattactctccactaacataaaaaactaaagaaagattagtgccacattagcttgcaaactacgttagagaaagtataatgtattcgatattggagttagagaaaatgagcagggagctaacggtgagcaactggttctctaaaataacttttaacgaaaaagcctatgattctgtatttgacgtttatagatcttggaaaatgtggagcagcatttaccattaaaggttctatactaattgccttggttaatttttaaaatatttgtttattatttgttctatttatgttatgtgcacttgcttgtatgagttattgtgcatcggtggaaaacagaaacccatgcagaccagatcccctggcaatggagttgtgggcatttgtgagaaggtcatgtaggggctgggaacagagcctgggtcccctatgtaaacttgcctaatttcactttctttctgaaatgactggcttctctcattttctgttctttacgcatagtccagcttttcagagatgtacacagttgagcttcgtgtgcctagggttcatatagctttgaagcatattttaggatttttcagaaaatttatagaaaaatgaagatgcaaaatcatttttaaaaccatcaaaatgttaccgatgtatttggagcagaggacgtagtttttgagcagtgaaaaagataagggtatttcagtagatattattttatgtcatcattcataaatttcagtctttccctgaccataatacttcattggtgaatatgttcacattgaaacataagaaaaaaatccaagatgaatttgcatacctatgatggggaatgtactatgtatgtttatcttattgattgttgaataaaatactgttaggccaatggcaagcaaggactaggagtcaaagaggattctgggaaatgtagtagagaaatgatgatccaggcaggaagtgacatggcaaggagactcatatctaagcgaggaaacaggaagtatgtctcttttcccgtccgctcctgctccagcggcacaatgtgatccaccggcaaggagggacgccagtaaggcatccgataagataagtcttataaaatatataagtttatgatagttaagactgagctaacagatgagaatcctagtcattggccaagcagctttgaacctaatacaagtttctgtgtattcatttgggcctaacttgggcgggtgactggtgtagagctcacacatggcaatggggctcaggtggcttttggcagaaagatttatcgtcacatacctattacagtgggcaactgtattaaattaaaataaagggggctggtgagatggttcagggggttagaacacctactgcctagcctccttgacaacctgagttccacccctgggacctccatagtagaagaagagaactgagttctcaggttgtcatctgacctccaaacatgtgccaggcatatgcatggcctgtcacacgcacgcatgcctatacacacaacaaataaatagaaaaaaaaagacttaaaataatgagttaaaatgcttgctaaaagcccaagcaggacctggagagatagctcagtagttaagagcactggttgcttttccagaagacctgggttctattcccagcacccccatgattgctcataattgtctgacactccagttccagggtatctgacaccctcttctagtctttgtctgcctgcacacatgtggttcatagacatgtgtacagacaaaaacacccatacacataaaataaataaaaattgtgaatgcctaagcaaagtcctctggatatttttgccaaaaggaggcagagggctgagaaaagtatcagaatgattttttccaaaatgcaaaaagggagttatgagagtgagagattgcagcagtctcatgaaatctaaaagtagctggagttattatacacttccagtgtgtactttgactaaaatcttcagctttctttatctctcataataatgagagaattctttatataatacattattatgttagaaataatgtatatgaaattgctttttaaaaaaaagaaagaaaaagaaaagaagaacgatgtgtgtctaaacagaactttcctggttgtaaaattttgaagaacttggaacacatcaccaagacgaagacaacagaagaattctttccctggatgctttttacagcagaacaaagagccagctggagccttctggagaagagggtacttgtctgctcacttctgagatgcctgctcattttgttgtgacacacaattgcctgagcttgcagggttaatcctggcaccccacaagatgagtgcatttggactttttatttccctttcctgtagcaaggcaaaacccaatctgggtttagtcccgtagactttttctccttagttctttgctgcctagcccgagatgagtaacagtatctcactggaggaagctgtattattacaatgcctcactagaggaagctgtgttacatactgttcccagggcagaagaatctcgggcccatgttgttggcaatctttgatcggtgtccccactttttcttctttagactgtaacatcaggatggatgcagaatctctgtaaactcaccatggtgatgctcaggtgtagaacccataaactcatgggctccttgacatggatctgttgaagcctagtggtattactttgcctttctcagtgctgtgacaaaatgcccaaaacagcaacttcagggcagggctcatcactcttccaactttgaggatgtgtaaggtgggacggcacagtggcaggaatgaagaatggagctcagctacctttctctctattctttccaggaccacagcccgtgagtggtgccaccacatttagggcaggtcttcctgccaaaggttgtctcctgtgtgagttgagatcctgtcaagccgagggtcagtattgatcaccacatctctccttagagacaggactcgtgtgtaggctctcactaagtccatcaccatgaggcaattctttactgccatttcagagaggaaatcaaggaataatgagccatgtgactatgagcttggtcagttaccgtggagcataaataccatggccaaaggcaacttggggctgagagggtttatttcacacacagttccataagatagttcgtcatcaaaagcaaataaatggcaggaattcaagtaggacaggaacctggaggcaggagctgatgcagaggccatggggagtgctgcttactggcttgctcctcatggcttgctcagcctgctttcttacagaaccctgggacagcacacaccatgggctaggtcctcccccatcaattactaattaagaaaatgctctacaggtatgactacagttcaatctgatggaggcattttctcaactgaggttccttctctctaatgaccctagcttgtgtcaagttggcataaaaatagccagcacaatcacctgtgtaaacaaccaagctagcagaaatgtgggtcggggagcacgaaaaaccaagagtcctttgtcagagtcttacattgctgtggaatgagagtggggtccatgggaagcaggagcgtgtaagcatcacaccagttacagatgaaacactgctaagagctgcaacacagccaccattgctcttcttcaatgacaacagttcccttggaactgatctcctatcatccggccaaaggttgatagcaacaatgtgaccaagaaaacttcggtaagagctctcttaaactctgccctctttttgcaaccaggtttgagccacggtagtctttggaccattgtgcacagtctgagaagacagtctgtgcatctcagatggcttttgagtaagtcagggtttctgatggaattttttgtacctgaaattaagctgtgattgacacctgtcctgtcctaggccagtcatcaggatggtgagccctttaatttcttgttcttatctagtttgattcgattttcttctgttatgtttgactgaaagagatctaacaagacatcaagtctgacaaagatggaagacagattctggcttgatgagcagtagcgtttcccacacatccaacaaatccgacaagagtgctaatcacttgtattatttcaggcagattgtctaaaccaaaattccagatttagaactcatttactgtgtgattggagataagtcacttaacatctctgtgccttaaattctttttacaaaaaaaaaaatgctaacagtgattgtttctaccttataaatctgttgttgggattatacagaacagtatcatgttggtcagactgagataatctaattttgtgtggctgtggggacaggagaaataaaaataaggtgtttccctggaaaaagaagtgagtttcttcctttgaaatatcaaacaatggaacacagaaaacaaatcaggaagaaaaacaagtccaagactgagaggtggcaaggagccgaagagggatgtagaatgagttccatcctccagatccattggatggtgagaggaacagaacaaaggttctgggaagaaaccattaaggcagcattgactggttcataagtcagtgtcttacatcccaaagaggaggctgcgttcgtgagtgtggtcttgtgggagcacatgacggtacagcttaagtagcctgacatcacaggtgtgtaaaggacaaaggggtaaaggcgggctggaagcagagagggaagcgagggagccttccttagctcagggagaacaagcccctggctcacatggagggaccgcaccctcctcatggaaaagctcccgggcggggcgcgctttccattgcctggtgttttccccagtcctccaggttggaggagaggaggagtcttgtatgcaaatgtccatctcagggcagtaagcctaaaactatgcaccccatgattgattctaaatcttatcttgtgctcagtgatgaaagacgggaaaattatgtatgcctcactgctgtagacagatacatggacatcaataagatttataatggaaccaaaacatccgagggacaaacgagcagaaaatattcaagatatattctgactctattagaacgttaacacaaacctctcaagctgcttaaatattctaaaccatgcacacaaagatgtctgctatggtaatcgtttgtattgacagaaacagggaagtcatcttagctgtccatcgataatggaatggttaaattacttggggcatacaaagtatattttaaagctgtttaaacatccactaagagtgagtttttaaaagcctgtggtgggtgaggcagaacccagggtcttgagtgggctgtgcatgtttctagcactgagctatatcatcagccctgaatgccaagtgctactgacctggtggtgtgcgcccagaaccctcagaggccagcctggtttctatagtaaaactatcccaataaaggaaggaaggaaagggggagaaggagagacaatgctataaaataccaaaatatcctactatgtagcatatgaaaaaagtaagccatgtgactattttatggaaagacattgaaagtacagcacctttaaattgaaaaaacctacagatcatctatgtaataggtgggttgggtttgtgtgtgtgtttcttttgagacagggtcttgtgtagaccaggctggtctcaaataggtagtcaagcatggccttagactactatcatttgtctctacattccaagtgctaggattatgggtgtgtacaaccttacccagaattccttttgttttttttaactaactttgagggttggggtcatagctggatcagtaaagggcttgcccagaatgcagaagtcctgggctctatatccagctacataaaccaagtgtggaagtcttagaatacagtgtatgcatgtatgaaatatatatatatcaactcttatggtctttttttttctgctatcgtccttttgatttgcacttgaactgtttattagatatggcagcagtgtttagaattctttcagcaaggattatggaccgaatcagtactggtaaggttctgtatcatgccagttcagcactagagcactaagtgagtgtggtgatgctttattaacaacaatgtggctggagagattggctgcgtggttgtgagcacttgctgcctttgggtctgagcaccagccagggggaccacaaccacctctaactccagatgcaggggctccgatgccctcttctgttttccgtagagattgcatgcacatggtacatataaacatgcagggagaacactcatccacatctctaaaaataatctcttcacggtgtcactgttaagtatttaaaatggtgtgtgacaggtgaagcaaggtgtatgggaatcttataagccagatgaaaagtttgacatttgctttattctccctgactcagataaacttgtcaccaacactcacatctgaagaaccatgcaaggtaaactttgttccaagcagccaaaagaagttccctcagtattcttagtcagaaggtaaagtgacagcatagtccacagaacagataggaacttgtggttagtttttgccagcttgacacaagctaggcttgtctgaaaagaaggaacttcaggtaaggtttggcctctatcagactggcctgtgggaatctctttggacattttcttgggaaatgattgatgtgtgagattcgagccctctgtgggaggtccaggattgtataagaagacagattaagcaagctatgaggaacaagccagcaagcccctccctccacggccttgcttcagttcctgcccccaggttcctgcccccaggttcctgcctccaggttcctgcccccaggttcctgcctcagtcccctgctgacttcatttcatgatggagttagctgtcaactgcaacaaaccctgtgttccccaagttgctttttatcgtgcttttatcacaccagtaggaagcaaagcagggcatagacttcaataatgaatttctttgtttacaggtattgagtctccacaatcctttatgtccctacagctcggattggcagcaagaatgaacttccttccttaagatcaggaacgagacctccacttatttttaggaaagaggttttcctggaaataagaattagagccaacgttagtaaaagcaggcttccagcacactgctgcgatacatagggtatttgcctcgttcctcagtcccccactccatgcgtgggcgccaccctgccatggagcagaggaccttgaccaaatactgagtgggaaatggttaataactggacttttttttacatactatcagtcctttattcggacaaaggagttgtcgttgataatgtggagactgttggaggggagtacagtaaacatttgtcctttttgtttcttttaaatatagaaccgtttcctgtgctttgagaaattcccatagaaagaaactgtatttttcctaaatcagtaaagtaagaagacaataatgttgccagagtaaccaaagaaaaggaagaaaaaagatgaccagttacatcccactttatacaagtaggataatatttagtgtctaagtcagatacagatgtgttaaataagtctgtcccacatcacttcaaaattcatttctcctgggtttccttctgtagccttgaaaagcaaactatctgctctccagtctcctgtaaggacaggaggcgggtagggtgggcatgtgacccggggtggccagtcagatgcacaggtccagacttagtctgctctccagtctcctgtgaggacaggaggcgggtagggtgggcatgtgacctggatggccagtcagatgcacgggtccagacttagatcggatgaaatcagataaagcaagaacagtaacaacagcatcagcatctggtctccatggaaacagtggaactgcaatgaaagctttgtcattctgtgtccagtcacacagcagtgtaggcagtaactactctatggatttgggggctcactggctggctggcctcttcatcctgaacttccaagttcactcactggaaggccatcttctgcctgggtcagcatctccatttagcacgttctctttctgcttacattgtacaaagtcacttttattttcctgttttccctattgaaaccttgtttacaggtgaccagagatttaggaagagaaaagaaaataatatggacatttaaatataatcacattctccactctgagcagctccatgttaggagggagcagggagtggtgctctgagcttatggcccagctgtgccactcactgctgagtgaccagtttatttctatgagatgagcatagtctcagtgtcactcccagaacactgctctgaatctcaaatgagtcaatactaagaacagggcgtggtacagataaaaaagcatatgcatgtttaaaaacaaacaaacaaaaaaacatgacttacaagttgtgttcagaggcaaagccagtcatccgtgatatcgctgcattgattcctcctccaggtgccaggaaagggtcttggaggaatcttcaatgtgaaatccgtcatcctgtggctgacagaggctagaacaagttaattacctttagtgctcatattcatgcatcatgccctgcagaatctattaagctggtgaactttgttagtgtaattttgaaatgaaataggggatgttcagaaagtctatgtatcctaaaacagctccccccactccagttaatcaaggtcccacagagtcatttattagcagacaatgtagaaaaggtgctcatggggtgaccagatggcttgaatgctattatcagagtaataaagggaatcagtttggctttgttgagacagtgttacatgcaggcttttggggttgttgagactgtcacatgcaggcttttggttttcttttgagacagatagctagaaagatgataggtagataaatagataaatagatagatgatagatagatagatagataatagatagatagatacatagatagatgatagagagatgatagatagatagatagatagatggtagatagatagatggtagacaaataaatgataggtagatatgaacatatatagatgataggcacatagctagaaaggcgataggtagatagatatgtgtaggtattatatacaggtaggtgggtatacagatgtgcagatatacagatgtgcaaatatacagatatacagatgtgcagatatacagatgtgcaaatatacagacgtacagatgtgcagatatacagatgtgcagatgtacagatgtgcaaatatacagatgtgcagatatacagatgtgcagatgtacagatgtgcagatatacagatgtgcagatgtacagatgtgcaaatatacagatgtgcagatatacagatgtgcagatgtacagatgtgcaaatatacagatgtacagatgtgcagatatacaggtgtgcagatgtgcagatgtgcagatatacagatgtgcagatgtacagatgtgcagatatacagatgtgcagatgtgcagatgcaggcttagatgtcacgctgtcacctttctctagagagtttcattcatctttagatcctttagttcatctgtggtgtttgacattagacttgcttataccaaagaggaagtaaagccgtcagcttactttgtggtttttaacagtcactgtggcagctgctcctatgtcactgagtaaaataccagacagacagacagacagatgttggggaggaagggtcagttttggcccctggattcaaacagctcgatctatgttgacaaggaaggcaataaaatgaaatgaaatgtgtcctcatggtgagaattttcttacaatttgtgtcctctcattcagaaggctctgcagactaacatctaaggcttcttagaagttgacatttatgcctcttacccaaggagataaaatagattaaagagttttttttaaaaaaaaaattcatgtatctgtttttactgtccaatcaatcttgacagctgaggagattttctcagctcccatccaagcctgggtttctagtttccaagttacagggtcacgatccaccaccctggggggtggtgatgcagtctccatagttatttctctatcacatcacacctagtaagtaaatgtatataaaaccataatgagggtggatgctgtacacttctcacccagcaagacccccaaatcattctcctgtctctgtttggttgttagatatgtaaggagaagccagggagcaatttctggggcagacaaatccctttgtcaatggtgaataaagcttcctgggctcactctcatgtgcagagtagaatttttagtaaaaagtcattgactgagacctcacagcctccaaagctgatggctatgtgctcctgaactgctacgtgtgatttcagctgctgtgacggatgctcagccccatcagggcagttcttgaatcctctctcaccttggtacccgttgccagaacaaatgtaaccctcaaaaggaggagtgttttagaatgcagaggcgtctgctcttggggtgttatgcggtaaccaccaacacgttctctgccgcatgatgttctgccaagctgcgtgggcacgcttgctcaccaaaagatgaccggtcctctctgtctgtcttcatgggatttgaaatcttgttggagataatgattaagcaaaccattgtcccaggttgacttttaaattttgactattaatacatgatttaagatactaaatgtatttctctataccactttctcccacaaaatagtaatgatgactttttttttccaccatagggatagtatgtattgtgacagtctgatctatttagtattaagcaagaagtccagagtggatgcttgggattatttaagggggtgagagactagaagaaacctctcttttttcttttctttttttttaaaaaaatctttgacgatccagaggaagagagatggagtttgttgccagcacctgctcccttttcctctaagcttacaagaagtaatctctctgagtcacagtgagcgactcagatccaaattcctcccattgtttgttcatctccaaagtccaggctatgtgtaatttctctctcaccaaccaatgcctctgcctgagtaatcctcggggcagcctgaaagaaagaactctatattcaatctacaaaaatgactaaaagcaaggtttcttaatcttctagagcactggttcttaacctgagggtcatgacccctttgggaatcacataaaagatataccatatattgaatatttaaattataattcggaatgtagcaaaattacaggtatgaagcagcaatgaaaataattttatggttgggggtattcaaaagtcacagcattagaaaggttgaggaccactgtaaatctagagggttcgtgatctttcaaagatattttgtttgacagataaacactgcatagattgaggtggtgacaatgttttgctggatgcttaggtcaggcaatggatgtgtgcattgtctaatgtgcttatggtatgtgggggttatgaagatttaaaatctattttcttggcagttttcaagtacacagtgtattgccattacccatttatgtctaacctgtaaagattagtacacaacccctagaggctaggataagccccaggatgtgaatggagaaaggtcgggaagtaggtggaaaaacacccatgacagggacagttccgatgttctgtagcccaggatgataactgtagttgcaacaactcaccgcacacttcaaaacagccagggaaggcactgaaggttccagcatgaggaagctttcacaggttagtgcgagtatcaatgccatgttcctcaaactaacttactttacttaacacccacccacattgccataaatgacaggatttcttccttacccacagttaagcagcatccctttgtgtaaaattattctcttcttatccgttccttttctacaggctgttgtacttgactctgtctcgcagaagtggggacgataaacctgaagaagcaagcagctctttgcaatgctgagcctctctggtttgtgtctgtacccagtcatggggtaactgggtcgtgtggtggctgtattgtcagaggtttggggaacccaacactgttctctacagggctgaactcatttctgcttctacaaattccccactcttctgttttcttgcccacatttgttattttttgacttgtttataacagccattctggctaggataggtctcccctctccccacccctcccctagctttcagttgtatctctttaataattagtaatttgaacatttttttaactttgtgtctgaattatttattttgtttctagctgactttaactgttacataaaaacatggagcttggacacattaatctggagccatgtgatgttacaatactgtataagtcatgcaatgcttaaacatgactatcccctcaatcactgaccacgctacagcagggtcttgcacagacttcccttccagcttttccttttaaaacgcacagtacgttactgttgccatagtcacttcactgtgccacaccacacctgaccggcttgctaacatcctgtcatatacctgttgggcattttatatattcttttacaaaatatatctacttaagtcatttgcctattttcaaccagactgcttgggcactttgctagtagcctaatcacttggtatttttcttcccttctttacttcagtgacttccttctgaggaatatttctactgcagccctcgagcattgattggcgcatggtgtctccattgttgaatctcttgacacatttggttaagagatttcttgaccaaatttcttcctgatccgttggctatgttgccatgtttctgagtccttgtcccatcctactgtagtggggagcacctgctatgaatacagtcttattaactaactgatgtgttctggagaacctcccaggtacacttgggaggaatacatgctttccctgtggggagtagtaccctgtgtgtacacttcacattatttttatttgaggtatagtttaaacaaagtttccttacagactttctgttggatgatgtgtccattgttaatggtagggttcagaagctctctgctattgtgatatgctacactctattcagatctaccaacacagtttgaaaatgtatgtgtcccaatgctgggcacatatatgattacagttattatatctctccagtgaaggcaaccttagtcatcatacaatgatgttttatgtctctttttatacttttcatgtaacatctatttttactgaatacaggtatggtagctacagatatgttcttttggattccattttcattaactatctttttccatcctctcagtgtgaatctatgtgtgccacgcttacttttttttttaaatgatagcgctttactgggtagctggaatatactaatacatgtgaaacatttctattgtcaacgcttgaaaatagatagccgctctgtaaatgttaactgtgctattgctactgtaagtttagcccctaacaaaattaagacagagatggaagaaaagataattgggacagaagcaaactgacaggataggtattgaaaagtgacatcaactcctagcaacgaggaaggcacaactttaaccccagcccctgagagacagatgcaggtggcttcgggagggagttcaggaccatcctctccatagtcagccagaccagccagcctggtcccaaagaaaccaaacaacttttaagggagtgaagaacaaagaaaatgtactaaggatgtgaacaacttcttcttcttctccttcttcttctccttcttcttcttcttcttcttcttcttcttcttcttcttcttcttcttcttcttcttcttcttcttcttcttgtttatcgagacagggtttctctaggatgtaaacttctttaacaaagttcattcattgatgaatgtattcattcactaggaaattataagccaggtgctatgtgaatgttgaagatacaagaatgagccctggtcttatgggtttcatcatcaattaggaaaatacaaggaaacataaatgtaaattttaaagtctaatgggcatatgcagggagtgtctggttatttatgagtttgggggaatgtattgagagacgttgtgggaaagaaaataaacaattatcagagagacaaaaagaatacttctttttacccagagtgtgacaaaaagtcttcagctaagcagctgtcctcattggtgggcctgactcgacagaaatgtaagtaagactcctgtgtgaaccttgagtactcagaaagcagctgcacaccgtgggagaaggtgatctgctgtggttgggctgagagggagagaggaaaaaggagtgtccttggggatcataagctaatggcaaatgctcgcagggatctgatattgagactacagccttaaatcctacaaaccaaaagtgttgcctatagtggatttgttctggccatgtcaactagcttaggtcttacaagtgcccatatatcaactcaccattcacaaattctctaagacctgagttacaatcactgtgagctagatcctgtggaaatttaaatcacagaaacattgtaaaactcagttactagaatagccagagacagactataaaggaagcatatttaatgttcctaaattaaaaactatttcatgtatgatgaaggcatataagcagctatcaaaaccaaccaagaaaaagccaagagagagcatatctataaataaacaacatgacagataattgcacatgttcgggacaggtgactttttctctacaaaggttcagttcttaattgctagcatgaggatagcttcccatttggacagtccacaataatatctcctctaattatatcttactctcatccctcactttaggtgaactcaaatgtatgaaaagaaaagcttaagcctggcattggtggcgcatgcctttagtcccagtacttgggaggcagaggcaggtggatctctgtgagttcaagaccagcctgtacaagagctagttccaggacagcctccaaagccagagaaaccctgtctcaaaaaatcaaaaacaaaaaacaaaaaaaggaaaaggaaaacaaaagctttaaactaagataatagcatgagtagaatatactgtttccccaatatactgaagtatttattacatcatcaagttcaccagcacccacctgtccatgagtctgtgcccctccttgctttatggagttggcctgctggtgcacttggagttctttgaggggacacagaattaaatgagcgtaaatcattgacttgtcccactgacaagaatgttgacctttgacacctgtttcccttttgtcacagtggcctacttagaagtcaaagtttcatgaaacccttcttggaactccaatattattgaaaaattcatgaactggcatattgcataagtccagcaggaaaatgttagcagtgctttctatttattcccccatctgtctgcatgactcataattcccctctgcccccttcactggcgaaatctataccaagtgtgtcaattacataaacccttctctgcctagtcattttaaagttagagccatagacacttctgtaagaaaccccctgtcaattaaccagcccatgagaattcctcagtactcatggaccaaggggtcctagtggtaattctacctgctaaggacgcccaaagacagcctaataccacatctatggacctgtgctgccacctactggctggaggataagggtgccaaagctgggggggggggcacattctagagtactcctgacaatcctcccaaaagttatttagacaccaatagtacagaaagttgctgtgctaagtaaggaatgaagcactaatgtagggtggatctaggaatggggtttcactcagaggcaagtgggagactctaaaagctgcacttgaacctgacagccaggtcagacattggggagtaaaaaaatgctacttatagtaagctttgttttgcatttgtaacatattcaagaaggtgtacagggccagaactgtgctccttggttcaagtcagagtcctctcttggcgatattgaagaagttatttttcactgcacaagtttcttcacttttccagtgagtgagaataacgacagacagtgcatgcacatccatatcgcagggtggcgctgtgtggattaaggcagttaatatgtactgaacacttagaatggtaccaaccatggttgaaccaccctgttagctaacctcacttctatcctgctttcttctaaccactaacttcaaatcctaccatgcagaaccagttcctcagtatcttactattctgatgctatgaagagacaccatgaccaagccagtgcttataaaagaaagcatttaactgggggcttgggtacagatccagaggttagcccactgtcacatggcaagtggccatggtgctagagaagtagctgggagttctacctcctgatccacaggcagagaaagagacactgggcctggcatgagcttttaaacactcaaaacctacccccagtgacatagttcctccaacaaggccacacctcctaatccttctaatcctgtcaaagagttccaccacctggtgactaagcattcaactacaggagcccatgaaggccattcttattcagaccacctcacctagtgccaaaagttgtcagaaagaaaagagagcatttggtaagtgaaatgaattagatgcaagaaatgtcgagtgtggagcagcttgaaacaccttcctctcggtttccttatgtgatggttttaaggtgcctgtttgaatctgagcacccccagcattagcacctaataaacgttaccgcacaaaccactgtaaggcagctacaactgtgagttagcgctgtgctctgtgcctcgaatgtcgtagctcttgttcctaatactgggcgggggagcctgaatctgtccgtcaatagactactcaaggccatttgaggacgggctttaagttctgagtggcagcaagaacttccccttggtgtttcctgacaagaccagaaaagtctccctgccctggaatagccactctgctcagaagggtgctaagcattccaagtcttgatgagaaagaattgaaaattgcacagtctccatgactgggggcaaataaataaataagataaaaatccaccctatgcagttatttgctttacctatgaccttgagtgatacatgatataagtagtgtaaataaaccaactagagccccttcatatatatatatatatatatatcaatttgtaaagcattcatttgcagataatcttctctgtacgtcatcaaacatggccatatctcttagataacggcacactggtgagatcagaaattctgatcacagtcaccctcaataaccaggattaatagagttcaccaaatctgatgggcaaagccagatacacagaaaatctgctcccggtgctcatccatgctaagttactgaaaatatcaatgactgttttgcatacttccattaataatgtgtgtctctggagcagggctttgagaacttggaggcctcatcccacttgcaatttgcactcttgatgctttaagttttcagttgaagatgtgagcactcctgctacctggctgccacgctgtccctgctgtccaggactctacccctctggaaacatgaaccaaaataagctcttctgtgagtggcggtgaccaaggtgttttatctctgcaacagggaaggcattaatacagcagtggagctccctgccatctcagaagttgcaaatttcaaccaaacacacaaacatgttgtatcatattagctggtgatgactgccagggagaaaatagagaaggaagctaagcagagacagggtagtgtgtgcttgcaatttgctcactgaccaagatcatttgaacccagacctgagagagcagaaggactaaccacacatgtcaggaggagggacgttgcaggcagagaggaaggtgcacacacacaggttctgatgtcagaaaggacttgcaggtttttggattgtgtggacggtgcatcacttatcaggggcaacacagtaggaagtgaattaaagatgcagctcagggttcagcccatagctcagctgtggagtatttgcctaacaagcacaaggcagctgggtccgatgagcagcagtgagcaatatctttgagtgaatcttctctgtgatttgtctcaccattctgtattgatttcttgtcttaataaaatgacttccattgctgggtgacattatccacccttcgagagtttttgtaagaaatcagactatttcaaaaaggaattaaaatgatacctagtgcacagcaaattctaaataagtagttttagtattttgaatgtgtatttagattcttgaccatgcctacacaatcaacaggtctgtttagcccacttgttcagggaacgcttctcatttggatttgcattttggtcacttgcacctgtggccactctcacacagtgtgtgtattccttgagatttcttgcaaacatgtcactttaaacctaacacttcccaacctgtctgaagagagagggagggactcggtaaccgctgggagtgtgagcaactggcctcccggctttcttcagttggctcaggttgtcctccaccaccctttcacaatctcgacaggaaagatgatccatgacgggtgcttccatgtcctctaccccacctaggtgtctctggttagctttcccaggaagtctgcctctgagatacgtcatctaacaagcccaactgtcttccagaatggctcagacattctcagtgaccttgcctacttttctttcgatttattttatttttgactacatggatgtgtgtgtgtgtgtggggggtacatctctctctgtgtgtgtgtgtgtgtgtgtgtgtgtgtgtgtgtgtgtgtgtgtgtgtgtgcatctgtgtgtgtttctgtgcacatgaaggaagatgcctgtagagaccagaagaaggcatgagatcccctgcaaatatacttgtgagccaaccaaatttagacgctgggaaccaaactctggtcttctgcaagaaaagcagcactcttaaccactgagccatctctctagccccatagactgtttgtcttgcatggaactcattatgactggagggagtgtgatggaattgaactgctgtgaacatctcactgataaagactttcaggaacatcacaacttaatagatcccatcattagtatattaagtccttggtaaatattgtgtgccgagtctaccttgtcaactcgtgtttcctttgaaatctggaatagaacagtatatcttgggaaaccaagccagctatttgacgtgcctgatatggcggagaatgatggaagcttccctagttgatgcttctgctcccaagtctctttgctcagacatgtgcatcctcacattcctccgggagcagagccaagggctgcagagttttctgaatccagtgttaacattgcccaagggataaccctcctggaatctactgagtacaattatattcatgtttctgcaactgtaaatgactgagatgctgtgtaagaaaacacagtgaactcctctggcgtaacatgggccctgcccttaacaattcacaatttaccgagaaaagtttgaaatgaaaactcctaagtgaggaaagagcaccacagtgtggttctaatatgtaagagcacataaatgttcattcaatgtcacagtaaccaactatatcctctctcttggctagagagtaggcaatctctttaatcctttcaaaaatacaacttttggtttggttagttctataagttctattttttgtttctatttcatttatttctgctctggtctttatcacttcttgttttccactgggtttgagtttgacttcttggtttttttgtttgtttgttttgtttttgttttttgtttttttagagctttggggttatttattttagatcattgctctgtttttacttacttgagatttctctaatattttagagtaggcagttatagatataaattgtcctcttagactgccttgactacgtctcagaggttctggcaggcagtgtcctcactcttacttggttctaggaatgtgtgagaggcctccctgatttcatcaatgccttgctctctggttcattcaaaagtgcattgttcaattccaaccacttgtgaatttgagtattgtggggcagttatccatgctagttttgttccactgtagtttgaaaggtaactcaggctcaggaacacaaaaaactacatattctgtctcatatgtgggtcctggtgtctattctagaaagaggggaggggagagggatgggtgtggaaactcgtgagatatgaaatgaagggggactctgggatcggaagggtacaagtgacacagagacaggagattaggagaggaacatgtggaaaccagatatgtgcaaaaataccgcagaaacatgccactctgtgggaactaaaaaatcaaatttaaaattttaaaggtggatagaaggcaatttttggaagaatgtttccatctagtggccaagttgagaaattcacagggtttaaaaatatgtctgtttaatagtttcctactaagttataattcctttttgtgctcagttaccaagtttccaaaaatgtattctcatgtttggccagattcccaaagaagcaattactgcagtgagaagcgagttgtgcatttgttaaacagttggttcatcttctctgagctgatgctaagactctgggccccacctgattccctacacatgcacctgtctgcacctggataatttagtaatgttatagaccctccaagactgagccaccagcacgaatggtcaaattctgacagtgtcttacagctccatccgataccctggttcaaatactgggtgctttccctcactctctctttcatggggctttgtctggtctttctctgaggggatcatttgtatttcagctgtttaccataatgttacatccgagagctcatggagctgtgtgtcctcatagctcactccttccaccccacgccctggttcttcctctgttgacatcatgcttcacgcctctgttctctccttggcagtggtatctgggtccccccccccccccatcagttttgctcttgtacacaatactgggcaagttcccatggatcatttcccagtcatgctttctggctggtcacgcatacaatctcgcaaaacacctccccattccctgtccttggtcattctatttcctgtgggtaccttctattcacccaaggcaggaacccatgagagacaaaggagatggtttatccaagtccaggttttgttgttgctgttgtttccttgcatataggagcatgaatgagagctacttacaggagcttgtgtgactctaaaacagacgtgagatgtgtccccaaagagttccacccaagcaccaccttccagaagctgcagaggtggataccgaattcagtcaacccatactcctccacactctagtgcctcttgagcctgcatgttgctgggagaggcacggaggaacttgtgtggctgcacaagtgtgtcaggaagatacagccctgccgagaacaccttatagttctgatttttgtcaagtctttgcatggcctgggtttcagaagcctgacaaagggcagcaagggagcaaagaaaacaccgatatagagaagttgtaatcaagcggtctgggctctctgttgggcaagctgcaccatcccgtttcttgtatacaaatggacaggggggcggggttattgactgcagctgaacatggaggcaacactactatctattcctgaagaaggaggcagagttattatacacaggtgaacaagggggcaggttcagctaatctaggtaggagcagccttgataggagagcagtcttcaggatgtaacgtctgtggtgagaaaactatggtggagattttctgcacacactgttgacactcacattcagacctggggaaggcttttcacacacacacacacacacacacacacacacacacacacagagagagagagagagagagagacacacacacacacacacacacacacacacacacacacacacacacacacacacacacacacacacacacacacacacacacacacacacacacacacacacacacacacagagacacactcgcgcacacacacagacacacacacagacacacacacacacacagacacacacagagacacacacagagacacgcgtgcgcgtgcgcacatactgaggcactggtctttgacatgaccacactcatgtcaacaatacacattcactcagggcttctgctcactccctacagttttaaaatcacactatgcaattgaaatatatttcccctagtttgcttttcgattgcccttgtcacaaagttgcaaattcacaggctcaagattttatctttatagtgtgactttgtccaacgtaacacctggtccaggcataaacataggagcatgaaacacagtgacaaacaaggagacagatgctcagggaagcacggttccccagaaggctgggatcactgggacgcagaagttttacagcagaggtgtttactcctcaagcactttacagacaaagaaaatgggtgtggcaatgtcatagtggtgggattcagttaagactccatccactgtcagggtgggaggaggagtggtaaaagggagggaaggcagggaagtctctgtaaagacgtggagatcacaggaaggtcagagtaagtcagtagacacagaaaggtctgaggaccaggaaaaaacagggatgaggaacaccagtagttttcataaggaattaggtagaaattttcattttgaagatgagcgatgccttaaaggaaggccagacctcagggaacttcagaagaaccctctagaaaaatgcttagagctgagtaattacagattataacaggggtctcagcgtgcaggattttgtttgtttaatctgtagcaattgtttttattctgagaattttctacgatgtgtgtgtttgcctcttctgccccaaccccccttataatcatgttcttcctccttcttttcccatcccacacaactctgagatttcttctccccaccccccaactccatccaggctagtttgtactgccccaggagtgaaacgagtcctactgtgtgcttgacccattagactcacaccattaaagaaaactagtcttctgatagtaagaacatcttatgtaacatcattggacctttgcctatccgccttccccacccctgctgggattttgtctggctggggcttgcaccggtcttgtgaatgctgtcacagtcacatatgttcagatgtcctggtgtatttggaaaacactgtgtctttgatgtcagccaccacagctgggtcttacaatatttctactccctctttctcaaagccccctgagctgtgatgtgattatgtatcccgtttggggctgagtactccgccgcaggccgcccagtgaccatctggggggtctctgtatgaattgtcatctactgtgagcatcacctctgatgaggcttgagggatgccctcagctgtggcactgcaataagccgtgaggagcccatttcaacaagacatgcccactgttccaactgtggcatgaatactttgcaactaaccaaccacttcatggctggatctaaagcctgttccttgacacagaacccacactggacactgtgaaaggggccagtgacctgtagcttagatatgtcataggccctagagaagaagccagtattgactgctaaatggatctatagagcacaaaggtgtcctgacccagagtggcaataggtaagtaaaaggagacaactgaaatacttttaaatacagggacaaataatataaaacacaccaatgtggattcctttacttgtgttttaagacaggcagcagtgcctgactctttcacctcaccccttgaactagtccaagacttctaagcgtttctggaatagtcatcaggcagaataaccatggttggataggtgttttattgaagacaaataagaacaaaggaactagagcaaagtcctctcaatagactgtaggtggagttctcatgttccacaggcgctctcaaataactgacttggaatcttaatataaattataaatgcttggtcagtagctcaggcttgtttttcaaactcaaattagccaatttctattaatctgtgtgctgccacatggctcctggcttgttagctcattttgtacggtcctgcttccttagtggctggctggcaactcctctgactccacccttcttcatcccagcattctcagtttggctctcctgcctaactttatcctgctcagctattagccagtcagcttgtctactaaaccaatcataatgacgtatattcacccggtgtatagaaagattattccacagcaataggctttatggcctccacatagcaaggagtgcctagcaggtcctcagacacactgcattcccaaccactcattgtcatctaagtgttccccatctacctggcccaccctgtattcattcgctctcctttgtctgaatccttttctccccttctgtggttcaaatcacatgtcttctagagagcagggaccgattctcacatcgggataaatgccttcaggggacatggcggctcgtgtgctcacaggtaagcactaagggggactaggaatgttaaatacacagggttgtctcttcaaagagagatgtataacctcttttcccccagaaggctgggagtgggtgtagttaataacctttgccctatccgtgtggctgagactacaccagatctccccccaggccttatcacgagcttgttttcctcagtcaatctatgcaaactgtcttgctgtaagatgtcacacatagtttacaaagaatttctatgtggtgatgtcttaagctttattgttgagttatttatcactacacaaaaaattttcaccaaatcatgctgtgcttaaatgttcctaaaataaactatttggcatcagactcttgaaatttgaagcaacaccagccactgagtcatgttgaactaaatttcctttttgctccttgcagaataacactctggtggccatgggatttgcagagacccccataactacccctttaatatataaactaagcctcagggtaatgttccttaactactgttgaagttaccaccccaaactcgcatctataaaattctagcaaatgtgtgtatatttgctgggtggttcttgggagagatggaagagatggtaatagtaaacaaactactccagaataaagtgtatctaccaatggtgtgcatctgaacacacacacacacacacacacacacacacacacacacacacacacacacacacctgtcacgataaatctttctgccaaaagccgctgaaccccacagccacctgtacgctttatgtcagccgcctgcccgagttaggcccaaataaatacacagaaacttgtattaggtacaatgctgcttggccaatgactaggattctcatctgttagctcagtatcaattatcataaatctatattttataagacttatcttattggacgccttattggcgtccctccttgccggtggatcacatcgtgccgctggagcaggagcggaggggaaaagaggggccttcctgtttctcctttgcttaaatatgagtctccttgctatgtcactttctacctggatcagcatttttctactacatttcccagaatcctctttgacttttagtactgtctaactttctgtctcattggtcaaacagtattttatttaacaaccaataagataaacatacacagtacattccccatcacacaccctcacactcacaccacatgtacacagggagggggtggtatctgaagtccacaggaagagcaaagttataataatatcgtgttttttatagttgattccctaaggcgtcttcatcatttgcttttacctcatgtagcagctgccttgcaagaggctcctctcctctttctcccccttccagccttttctaaagcctggttcctaccacatgaatatcagtcttgccatccctacatttaaagagatactgataattgccagcatctagaatattaaatcaaagtgtcatcttggcagataaggtcctaagtgttatgcctcctcctttctgtttctctctcttccatccttagcgctctcttccagcattgcccctggcaatagtgtcaatcatccttccttcttagttccccagacatacaatggcctctcccaggcattttatggcctgagcagcctctttggtaagcaaatcctccttattcacccttcaagagaagtttgactagccacccagaattccccagacatcacagcatcttctgtccatcctaattcaccctataaaacagtagcaatttatacactagcggagtgtgacttctttgggtggaatgcccctctgttcccttggtaagaatgccctttcctacctttgtgcctctgagctcagcttctgaaactgagggtcacagctggatatggggttgtgtaactgaaggaaaactctggcagcattaaaaggtttctgaatgtgtggtgaccaaaacgctattcaaaactcaaatgcataacaagtcgtgtatgtgtgagtgtgtgtgtttgtgtgtgtgtgtgtgtgtgtgtgtgtgtgtgtgtctgtgtgtgacagagctctcctgtgttgctctgtgtgacttcactgtggcctaggttctgaacaaacagaatgtacactttgtaggccacatgcaatcatgtttcacagaggcgagaaacgctgcctgaaacatgtgggctcggatttgacactcatgtgttgtgagttgcagtgtttttactgctacctgcagatacttctctcacagaaacataattgtttgattcacagaagacgcagactttcagcattttcctgttgctgtcctcagtctatatgaggctagaatactttggcattggattgtatgagagtgtttgatcttaaatggtagtttgagctgctttcttgagatccataaaaggtcatttaatgaatgttggcttggggtcacagcactgtttctcatgacttctgaaagggttgaaaatatactgctgctgttttgtactgtgtctttacgcacggtagtcttctcagcatggaccattgagaaaaccaaaacatagaacaactctaaaaaacatcagagataccctgtagtatccagtaatcaaccattatttaattatacatgtaaaaattatcaaagacattcatctcagtatgcaaatggaaaattatatttaccaaagaaatgtctgacactctcttttaaacttttattgattattattggtggagggggtatatgagcctccatgtacatgtggtggacagaggacaattgattgacggagctggttctctctccacttttacctggattctgggactcagactcatgtcacaaggcttgtgtagcaagcgccttaactcattgagccatctcactctcctcttgctgacttattatcagtaaatgcttttacttgtctgccatttcatgtgctcgcttgcagaactttcttgggcttaaagaatgggagatgtttaagaagccccacctcttgagcacttggtggatgacataacatgcgcttttggtaatgaacagtcatgtgcaatccaggttgtcggggactcgggactggcctctacagtggtggtggtgggcatgcacaaggaaaggcaactctgcctgtggtgaggatttgtccccaaacttaagttctcagttggtgcctccaattctccccccccccccccgttgctttggttctctttccatggctttggattctggacttttgaacatttcttttccttgttagttctgaatgtccttgatggttcactattatgccaccctctgattcctgtaaatggtaccaaataggactcaagccaccttgcccagggtcaactgttctttgaccagagcagatggactttcttcaactcagacatataggatgatgggagggaatggcttgctctgtccattccagtctcacagaatgatctagataagttacaagaagagtagtaaatgaaaaaatagtgagtcttacattttctactcccttcggaagcttgcttacctctacagaagagagagaatccacttttctatgccccgataattcaatcacagtcatccctgtcaatcacatggcatgggaaggaggcaggttcccccactggggagaaagttagagcaggatgtgtccagagcttgaccctgcatggtctcctgaccctgtatgacctcctgaccctgcatggtttcctgaccctgtatgacctcctgaccttgcatgacctcctgaccctgcatggtttcctgaccctgcatgacttcctgaccctgcatggtttcctgaccctgcatgtcctcctgaccctgcatggtttcctgaccctgcatgtcctcctgaccctgcatggtctcctgaccctgcatgacctcctgaccctgcatcacttccttcggcccaaagcaggaaaggctgcctcccacttcttccctgccctttagaggaaagatgtctcagcagcagaacagggaaccctgtggacactgtgagcttgttgctgttgtatatcaaatggaacacagagaggctttgttgagggctctgcctcttggaattctgaatcactatccgttgtctcataaatatgactcatttgatcaatggcaaaagaatagttttctctttgaacagaaaattctcttagtgactcctttgtttgtttgttttaattctgtaaaagtgaaactttaacttacttttgacctagtttccctagattttccgaaatgggctctgtcagctattatagacctacactggttatcctgaaatggtatttagttattaaacaaattaaagaacagaaagatgcccaagagatgtagagtatcaccctgggaaatataatttaaatcacatttgaattttgcttacacataagagataaagagccctaagataatgatgcccccatcctgaggaaaagccaaatagttacttccttattgaaaaagttttgttttttattatatgtatgtatctgttttggggtgtgtgtcatggagaccagaagagggccctggatactctgacactggacttagaggtgtagcactgagctgcctgatggtgctggtgacctgactggatcctctgtgggaacaccacacactcgtagtcagtgagctgtctctccagtgattttcataaccccccccccccccccgccagggcccaggctaccaaacaaccaggaaagctatctataagagtgacaactcgaggggagggagagggagaagggacttgaaataagcttgttccctaactagaactaataaaataaaaaaaaaaaaaaaaaaaaaaaaaaaaaaaaaaaaaaaaaaaaaaaaaaagagtgacaactcctctgggggttccacctttggtacagcaggagtggcccctcaaagagcagccatgaagaaagcagttgaagtgcaaacaaaggctgagcaagggaaaagaagacaagtcatggttgttgggaactcaagaagtgaaactctcaccagctcacaagtcctctctgctgggccgctaatgagtagatttaatacacatggaggtgagatggctccttttggttgtcaacctgacgagatctggaaccaactaaaatgcaagccactgggaactgctgtaaaggactttcttgatcacatcatttgaagtggcaagacccatcctgaatgtgaatgatatcgtctggtgacagcccatataaaaagacatggaagaaagaaacttggttgtcctgccatttcttcacactgctggcgacctcatctatcctgctatgttgcattcctttgccgatgtttttagggtttctaacacagactgaagcaacatctctccaggacccctctaggcctccagtgacaagggtctgatgctccattcagccttgtaggctaagctactaccagatgctgaacctctccagtagaagacagctgttgctggactatctagacagtatcgtgtaagccaaaataaatgctttgctattctatgttgcttttggtcatggcattttatctcagcaccagagaaaataaacagctaatacttggggcaaagtagaagatggagcatcttccttgctggcactctctggaatggaaccagaaaactttccttcagctccaggcaggctctaggagaagatctacagattctagggcaggcaagtgacctttgctcttcagagggcaggacttgccttgagtgtcatcttgtccagttaggaagcagaagctcagttaatgctggcagagctagcaggagggaagaggttaggaggccggcctgctcagtttagtgtgctatgtttgtttttaatctacatattctacttttcctctgcagtttcaggctcataacctactcctaaaagcaggccatagaaaacagcatttctcttccccaaagcagaacacagacccttccccgccttcctttctggaaaatggctgtcaggacccccgatctgcttgtctaaggaagactctttcctagtcagggtttaatccattatcatcatggcaggaagcaaggcagcatgcaggcagacatggtgctggattaggagctgagagtcctgcatcttgacctgcaggcaatgtctcagaggtctgagacactgggtatggcttgagcatatatgaaacctcaaagctgacctccacagtggcacacttcctccaacaaagtcacacctactccaacaaagccacacctcctaatagtgccactcccaaagagtttatggaggccaattatattcacactaccacaggcccattcaagaagagctctgctccacaccctggagggaaggatgctccatatagactgaggggaacctgaaacattcagcctattagcattgcatggcatccttttaattcaaccttattcaagcagcattgcctttgcctgagccatgtttatacaaggaattcctcataaatcccagtgggacaatagccgcctgagttctgcccactgtgttagggtcccaaataacacacagagacttaaattgggtacaatgctgctggccaatgactaggatttctcatttgctagctcagtcttaatcatcaaccacaactattaaactatatattttataaacttattttactgaggatgccagaagcaagcgtcctttcttcccaggctcacatggcaactctacagagaagagaagaggaggaagaagaagaaaagaaagagatcaatttcctgcttgtccctgcttatattctgagtctgcctgctatgtcacttcctgcctggatcacaagacttctctttactacatttcccagaatcctccttgactcctacttccacctaactagctacctcattggccaacagtactttattcaacaaccaataagctaaacatacacagaaggacttgccccatcacccaaagagtttatgggggccgattacattcacactaccacaggcccattcaagaagagctctgctccacaccctggagggaaggatgttccatatagactgaggggaatctgaaacattcagcctattagcattgtgtggcatccttttaattcaacctcattcaagcatcattgcccatgcctgagccatgtttatacaaggaattcctcataaatcccagtggacagtgttcaaagaatttccaaatagttgagcacatggagactcttggaggtcatggaagtgtcgcacccctttctgtgtgttgggataaactttttgtatactgtgtgaagaagtgtctctgtccttgcccaaggcacctgctgactggtttaataaagagctggacagccaatagctgttccagtaggtgggacttctagggagatataggaactctggaagagaatctgagatatgggaggatcaccagccagatggagatgaagtcagatgtacagtattgaggggagttaatgaaccaaccacgtggcagaatatagattaatataaatggattaatttacattttaggagctctctctctctccctcccccccctctctccccctctccccctctaggtgactcagcattcagagcacctgttgctcttacagaggacacttccagattcaattcccagccctcgagccttaactcacaaccatctgtaattctagttccaggggatctgaccccctattctggcctccataggcactagcattgaacacatttagtgcacatacatatgtgtaagcagtatacccatatacataagataaaaataaatattcttaaaatagcattacctatcatatcatcaaggttaattattataaatagggagaaagcacatgaaaaaatgtcagcaaaaaatgagtaggatataatgtgtgaagaatagtttctaggggctggggagatagctcagagcttaagagcactgactgcttttccagaggtcctgagttcatttcccagcaaccacatggtggctcacaaccatctgtaatgagatctggtaccctcttctggccctcagggatacatgcaggcagaatgctgtacacaaaatgaataagtctttaaaaagaaaagaaaaaagaatggtttctagtaatactttcctctgcgcccagtatctcttaaaatgatggtcttggccatgtaggataaagaacctagaacctatgaaatctgatatttaaattctatttatcaatgatattcactttcaagtaggctaacattttggcttatctattagcaaaaatatgtattttatttattctgtttgatcagacttacaatttttgacagagaaaaaatgaacacagcttcaaatgtgtcttattatttttttttcatcttaatcacagaattaaggagtacttcctcaaaatttcacattttgtacagtccccatgccaaactgagcatggcagtgttactctttacttaagtagccaatgccacacacagtttggagtacatctattagggagacatgttatctgtgaaataataaaattcattgatacttcatccaagaacataataacacatgttcttgccttcttgtgtgctaatcaggggatctcatcaactacagagagtgtggtggtttgaaggagaatggcccccataggctcagagatttgaatgcttggtctctagtttgtttgggaagaattagggggtgtggcctcattagaggggtgtgtaaccaggtggggtgggctttcaggtttcaaaagcccatgtcagctccagtccttctccttgcctccgacttgcagatcagggtgtaagctcacagctactgctccagtgctatgcctgtctgcttgcagccatgatgaccacggagtcaccctctgaaactgtgtgcggtattcccattaaatgtttccttttattggttgtcttggccgtggtgtctcttcacagcaataggaaagtgactaaggtgatttggcacttgtgtagccataatgtgacattttgaacatgtgaaaaattcttttggattcttctccgctttccaggtcttctaaatgatgcggtttgtttcaacggttttcaaagcactttggtacattgactggcatgttgagttttagtggaagtgcagagcctgtactttcctcactgctgtgaccagcatgtgacagcatgtgacaggaagcagcttcaggaaagaaagagttattttgtcttacagtttgaggagatacagtacatcatggagaggagggcatggcagcagtcccgccatggtggccacatgcgcagtaggactcacatcttggaggacctgggagcaggaagaaggcaggcagtgggctggactgtaaagtctcaagccccgccctcagtgagccacttccttctgtaagtttccactgctaatagtccacaactttacaaaactgccgcactagctcgggtgcagggtgggctggcggcatagtgttcaaatgcatgagcctgtgggaacattcctttctcaaaccacagctaacaaaagactgttatttgtcgccagtgggaggttaatccacgatatgctaatgcccttatctgccccttcctttctgactatttctggttctgaataatgaaagcttatctctccatgtgggcactccttcccatatttctctttcaattaaaggaaatgtcctggctagtttcttaccaactggacactagctagagtcatctgagtggagggagcctcagctgagaaaatgcctccataagctcaggctgtaggtaggcctacagggcattttcttttttctttttggttttttcgagacagggtttctctgtggctttggaggctggaggctgtcctgctcttgtagacctggctggtctcgaactcacagagatccacctgcctctgcctcctgagtgctgggattaaaggcacgtgtcacattttcttaactagtgatggatgggcgagtctagcccattctgggtgccgtcatccctgaattctatgagaaagcaggatgagcaagccaaagaaagcaagccagtaagcagcaccctccatggcctctgcatcagctcctgcctccaggtccctgccctgcttgagttcctgtcctgatgtcctctgatgagccagataagcccttttctccccaagttgcttttggccatggtatttcatcacagcaacagtgaccctaacttagacaggcagctgtctctcccacaagccttctaccacaggtctgcctagtggcttatcctgcccttccatatttattctagagcgttgtctagaacactctccctcttcagcatcacagcatttaaaaatcttattctttgtgaacttcttacaagaatacaaagaaatctgatcgggatcattcccttccccccttttaccagctgtgcaattttgagcacgttttcaggcagtttttaaaactcgaccttctgtttttgaagtggcattagggccaagtggtagagtgttttgcatgtgtaaagttctggttcattccctaggactcctagtaaaagagaagcacacacacacacacacacacacacacactataaaccattcatttatactaagcccacacttaacacagggtagctgtgatttctgccttatcaacattagctggggtccattaagatagcagactttaaaaagtatggtttagggattgggcgtttaggtcagtggcgcctagcaagcacaaagcctcatgctccatccccaggtttggaactgcagggcgtcaggctgagagcaaaaaaacccgaatccgtaagcaagacaaaatcgtgtgtatctacagtctagaaacctgtagctgcccttgcacaccccaggagtggttttgctctgtgctgtcctgggctctggcagcagggaagttatggcgtttgcaggtaatgcactgtaaggtgttcagattcttaactcttcattgaatgtgcacacgtgcattagccgtcagcccgaacatgtgtgtgacggagaacagggaaaaaagcgaaatctgagctagtccctcagccccagaccggcctgccgcctgaagccccgccctcttgcaggccccgcccagtctactccgatgaagtgaagcgccaacgctgcgccgttttgtcccacgcggcgacccgtcgtcccgacggctgtggcggccgccatggaggcgagcgggccctgaggagaggcccggccaggccggcggcctgcagccgcgagaggcggaggcctgggggcacgcaggagggaggcgggtgcgagccgggacgccgcgggaggctcggtgctccgtgtgtgctcctggctccggccccggccccggccccggccccggccccggccccggccccggccccggctccgaccccggccccggccgcagacatggcgggcgggcactgcggcggcttcgccgcggcggcggccagcagcggggagatcgtgcagctgaacgtgggggggaccaggtgagcccgcagccgcgcggggacaggtgggcgggacacttgagcatctgcagctcaggtggggtccccgctgcagcccgggcggtgtctgcagcccaggtggggtccccgctgcagcccgggcggtgtctgcacggccaggtggggtccccgctgcagcggggcggcgtctgcagcccagatggggtccccgctgcagtccgggcggtgtctgcagcccaggtggggtccccgctgcagcggggcggcgtctgcagcccagatggggtccccgctgcagtccgggcggtgtctgcagcccaggtggggtccccgctgcagtccgggcggtgtctgcagcccaggtggggtccccgctgcagcccgggcggtgtcagcagcccaggtggggtccccgctgcagcccgggcggtgtctgcacggccaggtggggtccccgctgcagcggggcggcgtctgcacggccaggtggggtccccgctacagcggggcggcgtctgcagcccaagtggggttcccgctgcagcccgggcggcgtctgcaccgccaggtggggtccccgctgcagcgagggcggtgtctgcagcccaggtggggttcccgctgcagctagggcggtgtctgcaccgccaggaggggtccccgctgcatctcgggcggtgtctgccagccgaggtggggtacctgctgcagcggggcgatgtctgcacaaccaggtggggtgcccgctgcagcccgggcggtgtctgcacggccaggtggggtgcccgatgcaggcggggacacgtttgtatggccctaggcgccccgagcattcctcatagtctgttctcagatcgagtgcacaaattgttagaactgtctttattcctccgggttcttagggtgtcaggctagaggagcacagttggcatgctgggcctgtctgagctagtgactcagggcctcccgccggctaagcaagcatgctgacagggagctgtaagcatgcattccagcaggtggtagtctctgtgaagcctggtctgggcctccctttctctaggttcacctagctgtgggcttagctggtgttcccttgaaagcctgctttggtagagactgtgtaatactaatgtcagtgcaggggaccagatagatcaacttcgccgtttatttccagagttgctcttgatgcatgaacaggaagggtctgttccacttgagtgtgtctaaaactggcttgtgagcaccttcggtgttggcaaagaggaaaccagctgtgttcttgatcctctcttaggcctttcactcccattctgtgccttacagtaagttagttggccataaaacaatatcaaaagcaagcaagcaaacaaacaaaaaaacaacaatcaaatctgtttttgtaggtttgtcaggacttacatattttcttctcagaaaagcggttacgtgccggcactggttgaggggagtttgggttttaggcctaaggatgtagggagtccagatacttgggatataggctgttttactgtcctgggaagactatttttcattgtctaggactttaaacatggaaccgttttgcttatttaaaaactacaagttaacagcagtgaaaaaagtgaggtggccctctgggtgctagagaactctgagttaggatttgtcctcatatgctgtcaccttttcctactgagcaaggcttcttctgcattgtatacataccaggtcatatgcaaatgtctatctcctagtgtaagaaatgtggtttccctgcccacctaaagttacatcaaagtattgcaagtagcttggtatgcaaaagtgaaatacttcatacaaagaggtctgcagggtgtgttactacagagaagcaagattatgctcatttaaaatcttgacagtgtggatggctgacatccttcctttcaggcactcaagagaacagagggttacgacaaaaactaagctatattgttagtgtggaaaagattgttaattgtcttaattgtgcgtgtggatgcaggtgtctgtggatgccagaggaccccttagagctggagtttcaggtgtagtgagttttgctgtgagccacctgacgtgggtgcgaactgaattctgggaaccaaacaagagcagcaagtgctcttcgtcactgagccatctcttcagccctatgttgtttattgtatattggagatgggtgtggccagcatgatgactggctagtcacttaaggaagcacacctgggaaccctggtttcatccttgaaaagatgaaaagagaaagaaaattgttctctgacctccgaatgcagaccttgacatgcccctccctacccccaggacgcctgtatcagtaacaaaaataaaataataaaaaagaaagtggatgtcttaatgactgagctccaaggactacaagcatactcaagctctgagtcttgaacattttactttacctatggaatttttcaaagtgctaattagcagagaatacaaaatatgacaataaatttattactgatttgaacattttagcagataaaagttgttaggtaggaatgaaacataaaagtaaacattcagctttgggattattagggttgattatgtcacaaacaacgacagcatttaatgccaagtgttggaacaccactttccaaaggtctttatcgacttacacacctgttagctcttgagagccagaggagggccagaagtcatgtttaccttgtacaaaacagtttggcacagttaagacagtcacaaaagtccctggaagagaaaaaaagcccttctgtgagtggctgtgaagtcaggaaggcctgatgggagatgacctgttgcatggcttgaaggaagtcacagagtaagacgaaaatgtgtctattgagaacatggaagccagacacagaagcatgctgctcaaggactgagacgaacgagcaggattttgtttgacttagtacttggtgggctttctttaaaaacaggtagtgtttactatttacagcattagtgaagaatcccagttccactcaagatctgtttacttaggtatcagtttaggtaggagagggccacttgactctacttgtggacagtttgggggaacaaactggcttcttgtgcacctagcaggccctccaagttggcacccttgggcgagttactttgtagtgctcagtttccagaaatgcaaagagaagctagtgccagaccatggactgatggaggaacttgagggactaaacatgaaaggtgagggtagtgacatcatagtatggttcataacaaatactttgacttgggttactttcatattttcagattggtttagtggcaagctgctagagtgaagtataaccggatatgcacatttctctagtgatcttttgatgtgtttgttatccatctatccatccttggcacacttcggatatgagatgcaaaacagcaaaggctctcatgtatatgtaacagagaactatgttaatcgtatatacaagttttcctttctctttgcccaaagttgcagattgtcttctggggtgggcttgacgctgatacaatatagcgcaggcttcccttgttctgcccgtgactgtctccacctgttgagtgctgggatgacagcagtggggccaccatgcctagtggggcattatgattttcagcaggcctgtgtactgtaatatggttttctgaaactgatgaacatgggatgtcagaagttataaactatctgtgtttgtttccttgctgtgacagaatacccaacaaaagcaactggaagaggtcagagttctgggctgtgttggagcctgcagaccacgatggtgtcaaagcttaggggctggtcactctgtctgcactcacctagaggggatgtgtgttgctcttcagccctttgctttgtattcagtacttctgcccagagccaagcagcatcactccatggcctctgcttcagttgctgcctccagatttcctgcctgtagttcctgaacaccagctagtgacatgacagaagtgagggtcatctaggaaattgtctccttaaggttagcctatgggcaaatctttgtcttgattaaagatggatgtgggaaggcccagcccactgtgtgtggtacctctcttgggcaagtggttctgggttatacaaaaaagcaagctgagcaagccacgaggaacattctcttcattgctaactgatagaggagggcccagcatgctgtgggtggtagcaaccctaggcaggcaggcaggcatgggctgtatcagaaagttaaggaaaggggagccagcaagcagcgttgctccatggtctgctttagttcctgccttggcctccttcagtgatggactgagacctggaagccaaatatttctccctaggttgattttgatcaatgttttatcacaggaatagaaaagctaggcctagggtggatcttcctacttcatttactctaatctaggaactccttcacagacatgcccaaaggcttgttcccatagtgattctagacaatctgaactcttccaccgtcattccttgaagttatctaatgcttcagaaatctagtctttctgtggatgcctctgttcaccattgactggttttcttttttctttctttctctctttctttctttttttgtttttgtttttcgagacagggtttcgctgtgtagctttggagcctgtcctgatactcgctctgtagaccaggctggccttgaactcacagagatcctcctgcctctgcctcccgagtgctaggattaaaggtgtgcagcactaatgccctgctgactggttttcttttaattgacctaagttttctgtgactagtggtaacctgtgttctattaaagagtttgctaagacacatccttaggaaacattgccctgtgttcttgacaacatgtttattgaactccttcctgtttatttatgtctttatgtatttatttgagacaaagtctcactggcctttaatttactatgcatcccaggctggcatggagctcatgccattcctctgcctcagcctctggagtagtggaattataggcatgtgccacctaacctggttttagctcctttcttagtctgagaagtgagcataggaattacttgacaacacttagattatttataacttgtgaaattagttgagagttagcatctctgtgtctctataagatcttttaatgaaagagatgtagagatatatctataagaaatgaattatttggggctgcagagttggttcagtggttaagggcacttgttgctcttgcagaggacccaggtttgattctcagcacccacatggtggcagcaactgtctgtaatgccagtcccaggagaatctgatgacctctactgcctcctgtgggcaccaggcacacacatggtgcaccataagatagtaaaaataaatacatctttaaaaaataattatttccctctttcccctagtaggtcagtgagaggatgtgtcttctctacagattgtgaattgtggatggaggaagcagagttaattttttccctatgattaagaagcttgctgtgataacagtaggcgatgtctgtgaggtaaccgggctgtatcagacattctgtggaagggagcttgtactttttttttcctactgtcactgtcattaggtgacataaggcctggttatgccaacggccacgtggacattttggtaatgtgtttatcaataacttatgtggaaatgttctgttgttaccatataaagcctgtaggttgaacaaaggaaccagtgtctcagtttctacgaaacacttaactgtgcacctgattatcacacctctgtttcagagtagctattggatctgtgccagtgccaggctgccatccacttttaaaaaacattattattattattaaacatgctcctaaaagtaagcttggaagctgtagtttttaaggagtaatcatctatggagaaaggacatgtgttaaggctgtgctgtctcagtgcttaggtgtgcattgacctctgcggtcctcagcttggcctgtggtccactgacgtttgctttgccacttggaagatgcaaatggaagtgaaagaaactttgaatggcaggctgggatgaacaaggagcagacagtacccactttgctcatgtattggaaacaggccaaggatgctgtatagagagcattgaatacataatttacacaagttactagttgctcagaaagaggttgtatgggacggaatttctggaaatgccattgtggatttggtaacccagtagtgtcagcgacacggctgggacttggaggattggccttgaggaggaaggtgactgagctgggatgaagacataagaccaaacacacaaagtcaagagactgcagcggtgccgaagatctgcacacagctgagctgagaagttgagattggttgtgagggactaaagcaatgggagctttagggggcattgcgtttggtttttctcagagctgtttgagaatcttaattcagattgcaaagtggtaaaatctgaaagtagtaaacatgataatcaatgcctgtgcaatcatacctgcctgtagcatcactgtgtcttgtctaaaggtgtgttctcgttggtaacacaaggtgatttcaattgcagattcagtacctcaagacagactcttatgtggattccagattcttttttttccaggtaattaatgtaattctttatgcttttatacatttgattagttgccaaaatatgaaaattttccttattagttagattaagattttttttataatttgaattaatttataaattaaattttattgtttttgtactgttgagaagggttctgctctgtatccagtctggtcttgaactcctgttcctcctgcttcagcgttttagttgttggtgttacaggtatacatccaacacctggttaaaattgaggttttttttttttaaagttggagacagaagtttgcttgtgttggctttgtcagtaaggaagttgtttatattcagattttgtaactaattggagcttgttttatgactcctagcttgctgagtggaagaatttcaacacttcgagatgaaactggcgctgtgagtataatgttgtgtttctaaattcagtcaacaaaagcttgtaattcttagtgtgagtgacaggaaagctcacattctaggaaacccagagtaggtgtggcattttaaaaaaaattgtcacattgagtgtttctgaattggaaagagacccctaagcagtaactgttgtatacagtgatagagtggttgtaggatgtagcttgcattgacaattgacagaatagttccttagccaataattgaatcttaatttaatagtcaataagtataaataggtaaatattttggtattagagtggtacaaatttgcaggtgggtaaagtcctacaattctttatgaacctgtgaggcaatacagcgtggaaacaaagtcctgtaaaatttaagccaagagattggttttagcactttccacattgccttggatgcagtggtgttcagacaactactgttagcaacagtgacaacccacaggagcagtgtgaagttgtttattggatgagatttgcaaaataaagcaccagagcagatgtgtctgcaggaagttattttagctaaaagttaaataaaaaacccagtttgtggttttcccattggaagcatctttgtcttgtgtgtgctgtgaccccccatctgttacccacctagcccttgaagcagacatggtgaagtttacccacctagcccttgaagcagacatggtgaggttgtcagctaagcctttggaaggcctgcactctaggtgacagctatggtagccccaactgctgtctgtacagaagtcacggtggctgcctcagtgggtgctgccagagcagcctgaggttccccgggggtcttcccccaagcattgtcagtagttagaaatgaaaacactcacatgaccacactgactgaccacagttataccattggagtcttagaaacatcaaaaccaaggaaatctcagtcagcctctgttgaaggggggggacatacattttgacttgataataaaacagttcttcacttgcagatatttattgatagggacccggcagcattcgcccccattttaaattttcttcggacaaaagaactcgacttaaggtaagagtctgatcatttttgaggccttgctggcagccagtgtttgagccgttcacaaagtaatgtgcctgcccaagactgctttttagttgtgtgtttgtgtttacctcggcacaccgtgttaacagttattgagatacaagtgtacagagtgtaacagtcctggcttgggaattgcatcatctcctcaagtaacatcttgtgttgggaccctttagtgcttccttggttacttgggcctgtgtggctaattgtagactacagtgccagctgtgcagtgtcccttgggccccacctgtgatttgttatctgcttcttactctccctcccctcagtccacccttctagcctctaagcgcctctgatccacctggtgaccaacaagcaccctcagctcaagttggatgggtacaggcctccaggccccgtcctccagggtgttgtcgcagctccctgggcagtcccctgctttgcatgatgtgtttcattcagccctgcagccagcagtctgagtctgaccgggctgctgttctggcggaaatgcagaggttattttggacgaatggctggtagttttgggtttggtcttgcttgtcaatcttctgcctgtgcgtaatttctctcacagtcgtgtcagttcttggtgtctggtgtgctgtttgcctaagacttcctgtctgtcagtgtctcagctcttgctgtaaatatttaaccttcttaccaatcttctccagcaggcctcaactccagaagggcacccacttttcactatgtgcccaaggctagccttgtgaccgacatatagtagatgatggatgattatgagtcatgagcgatcacttaaaccatgtctgtgaattcgccatcttgacttacctaccacattcctaccaggaagctttagttagtgtttttagcaacccttcactaaggctctgaatttttttgtagggataacttttggtgttaccattagctgctgcttcactgaaggtgtgctctttgcagatgaaaatgtgcattcatttattttggtccgatttgttccctgccatattcccagcgcacgcacgcacgcacgcacgcacgcgcgcacacacacacacacacacacacacacacacacacacacacacacacacacacacacacacacacacacacacacacacacacacagatccgtgcagaccaggcatttactaagtcagaagaagagcattgggtgtgcttgtttgggttttgtgtctgggcctggagtcagtgagaggcgggcagtcagtttcccgaatgagattgttttcttgcacataccgtgtgtaatcagaaagtgtcaagtttgcgcccagcagaattaaattttatgactggttcttttaaaaagaaaggaagaaatttgtaaaacattgttttaaccgtgtttcttgcatttttgtattgctggtgccactcgctacacatttgttcccagctgtccaggggcctgcctacagctccttgaggggccagccccgagtttgtcttgagcccttcctcgtcgtgagcttttgccattgtgccattgtcttttggtttatttatcttatggaagtattcagcatttgtgtgtgtgtccgtccatccatgtctgtgtctgtgtgtccatgtgtccaaactaaggtagatgtctgccatcttggatcactctctctgccctttatttgaaggcagggtctctcagttgaacccagatcttactgtcacttggttttgttttgctagctggcttgctctcaggtcctcttagcctctttgttctgcattctggggtcacaggtgggctgccacacccacctggtatttctgtgatgtggacggatctgaacttctacccctgtgtcctcatctttggacttcagttgctctcctccaacccttcctagcccctaccttctagtggcaggtaacacataaaacagttaactcccaagtctgtctgcttaagggttctctcttctcataggagcagagcgctggggggagccttccagtgagtcatgagtgctgtggctatgagcacagtctcttcacttcttatttacctgtcacctaactttgctaccctgtggcgacactgtcttcatctggatacaaggtccttgctggccttttatcaccagactgcattttattttaccagcacattttaacacggggtgtgagtgagcgctgttctggctcagtgaggaggtggtgaaacttggagggtgctcgtggcacagcaggaaaggctagagtaggaacagaaaggattgtggctaagaagtctagaaagacgatggtttttgctggtttttttttttcttgttggttctcaataattgtattagccctcttattcacacaaatcatcaacatatgtaaggttttaaggtaggtaacaaatgcttacattttaaggttttatttatttttgatatgtctgatgtttcgttcacacatgtgtctgtgtacagagaaagttggagcccctagaactggagtttcaggtggatgtgagctgccctctggctgcagggaactgaatctgtgccctctggaagagcagcaacatccttaacctctgatctctctagccccaacagatgttgtgttctatgtgatgttcctttagactttgagatgattaatggcgttacaaaaagaatatgagaaaaacaagatttgagcttgaggccccatcccttgtgtctggtgctgagtttctcctttgtctgtctccatggtgggcaggttgtctgtgtggagcgctcacagccttcatttgtttctttgcaggggagtgagcattagtgctctcagacacgaggctgagttctacgggatcactcctctaggtatgtactcatctcccaggactgaccctgtgtgacacacttgcccaaaggcagtgtccttctcatgtcctcctgacagtagcgtagtgcttagtgtctcctagtaaaagggtgacctcagctgtgagtcccctctaagcatgtcacctttctcctctcactgcccttaactagagaaagtagacatggtggagcaggtctgtgtttgcatgtcccctgacaagcttgcgttgactgttacagtgcgaaggctgctgctgtgtgaggagctggagaggtcgtcctgtggcagtgtcctgttccacggctacctacccccaccaggtactgccactcagatttatccagacttgccattgagcaagaacaaacataaagattagaaaggccttggttatttgagtttcagcaaatctgagccccatcggactgtgcccttttaggagagtgaaggcctcacattatgtagagcagggcctgatgccttctctgtaagggcccaggaagatagatcaccatggctgcaccacagctgccgtgtacaccacagaccctttagcccgaggacttgagcccaggagccctgcagggttaggtcagtgtcctctcggttactttgcctgtgcagcctagtgcttctgagagaggggttgtttttgaaaagatcccctctgaaagcatgaggagatgaagctctgaggcagtggatttgggcatggctaggatgacatgtgactaccataagcctaaagagcagctcagactggatggatgattgctcagtacactgaagctgggtaaaagggcgggcacatactatgataagccttaatccatggtctgtgaatagtaaaatgccaggaattgcttgggttgtgtcttctttatcttttacttgttatatttaaactgtttgacatacactgatgtgtttgaagatctattttagatataacaaagtttagatgtttgtgtccctctgttacaatgtgatatttttcatttttggaagggtaacagataaatttgtgtcctgctttgtaggtattcccagccgaaaaataactaacacagctaggtcctctgtggatgctaggaatggactcaatgctaatgctacagaagacgaagcccggggaagtgggaccccacctgggctctctggaaatggagacgagactgtcaggctgggtaagtggggttgcagagcagagaaggaaagcttgtgcttagttcttagggacaggctgccatgagttttgactgttgctcttttgctgcacacagaccacacacactctcttatactctcacactctcttacggtgctgtgtgttgaacccatggctacagtactgagtgctatagtaccgagctacaccccagccctttatttcctttttaagtccagattcatcatttatatcttggaaaatctcatttaacacttttattagaagtgtaatatgacctctgtttttatttctttctgttgcttttgtctgtagaacagttgacaagctttgtgtgagagcgagctagtgagatcacattttaggctcctctgtctgatgaaggcatgctgtgtagtgtaagctatgagcatgctctgctctgaccccctttcacccagacagacagaggcatgaagtggcctcagagccagaactttccgactcacttaagatgtaaatgcttctctctaaaactggcagggttccccgtggatccgagaaaggtgctgatagtcgctggccaccacaactggattgtagccgcctacgcacatttcgctgtgtgttacaggtaccacgtccttagccgtcatttggttttattttaggtaattatattgtctgtttacattgaatatatttgttctagccaccaggttttcccgcttcacttggtaaaaatttagtttttacttgatacctactctagtacctaattctgatagcctaattggctgctgtgtttcccagacagtggaatctgtggtgcagaggagatatgttgctctttctggctcacttagttattacattgacagcatcaggcaggattctaatgtgagctctgcagtttctttttcatgatgagtcagtgccgtactgtgcagcagagccggggggagctctgtgctgtagagttgccacacagttgggagtagccaggcagagagcagtgtgtggagagtgacacagctcagtgtctccagcgtgcggaggtttaaggtacttggattagactgtaagtggtgaaaaggagtgcagagtccaaagtgagcttgtttgtttttaactggggaagttagactctgtgggccacaggcagtgctgctgatagcagaggcagagaggtggccagaatttactccctcactttgagtgcatctaactttgttgtttttaaagtcaaagaagttagaaatttttgtcactttggtttagaaaaaaaaaatagctgaagttttgaacaatcctttaggacttgtttacagtcccattgcgaatactgaaagtgtgccatgcaggtttgcctctggagggagctgcatgccacctgcttgggtgtggctttggttgcagtggtgagtaaggtgactttgtcctgagtgcttttcaggtttttaattgccaaagagtatagaaatatggggtggttattttgtagatagctcatatatcatgggattaatttagcgaacggatttttttatagttgttttgtatttaccattatctgagtctaaactggttgtttaattattgacagggattctaggaacttgcttggttgtgatggttacgtagtgtggcagctgtgccctgtcaccatgctatatagagtgttgaagagaatcccacaggaggacggttgggagaaggaagagagatgctgtgctgttcacgtcattgcttgcatctgcttttgtggtctcttgcttaggctggcacagtctccctgtagctggtgatgcaacagtgtgttaataatggagggtgaccgtgttggctttccttgtaaacttcagatcacacagcagattgatgataaaatagatttcaaaaggcatttcatagaaccttttaagatcatggtcttttataggataatttacaatggaggatggtgtggtggcctctggaggatggtgtggtggccactgtgtgcttgcccataggccactctcagagccaaaagatctcaccccccccacacacccccaagtgtggcattagtcctgcagtgtggacaatccctgctttgtgcccagtctgagagagtataaaactctacatttcattctttcaatagttgtcagtttttaagttcagtggataagtgattttgtttatcttaacacatcactcccatctggtggctgagaatggtaattacagatcttaaaatgtggggaaaattgttaaattttaccctttattgctttgaagcttaagttaggaaaacattaattcttggttaaggcttaatttagtgagctgtggttgtactccttgagcatacatatttaaatgaaagtggtggctcgtgcctgtgccaattaaacagcacatgctctgccaatggccaccaggttagatttcaccgagtgccatagagtgaaagggcagctttgtcctccacctgctaggcaggaccaggatgatactttcgctgatttcatcgtcatgatgatataaccaggctgtgaccttggaggcttgctgtgccgtcacatagaatacctgtctggaagacctaaatccacataggacagaggaatctattgaaagtgggaaccaggcatggtggtcccggtctccaatcagctcttgagagtctgagccaggaggagtgagttgtacttcaggccagcatcaagtacacagaagaccttatctcagagagacaggggaagggggggaggaggaggagggggaggaggaggaggaggaggaggaggaggagaaggagaaggaggagaaggagaaggagaaggaggagaaggaggagaccccaagggggctatcacctatactcactggggaaaccgaaagatgttcttgctggaatcagcggtctggtgaaggtttgcatctggagtctataaaccatctcagaagacttctcagcctcactgtgcttctgttctagggaactcaagttatgatgtaatgccacctagagtacagagaccagttctcaccatgccacactagtgacagcgttaatatgattgctaacaggaaggaatgcaaactccatctaaaattctgactgttgttggccatcattgtccgtacagaatgacagtaatagctttgtggggaaatgtgagaaatacaactatattaaaaaaaaaatttaaaagcattttataaaacttaaaattctttggagaaatacatattctagtccttttttgtggtcatgtgtcctatgtatgtaaatgtaagatcaggaataatactgtctttagattgtaccaggttttttctttggggctagctcccaaatcacaacacagactaatgattagttgtaagtgttctacctagcttaagctcttttaaatggacctgtttaatctctctaccttttgcctctgggctttttatcttttccttattttcttgctgactctctgtctgatggctgcttggcttcttgccctaggtgtctttctcattctcttctccttctctctcatctcctcttaagcctagatttctcctccttttattctgacttctaaccctgcctatcctttgtcctctctagctattggctatgtaggtttttgttagaccaatcaggtgtcttagccaagcaaggtgaaacagatccataatttaacacacatctttacatcattaaacaaatgcagcataaacaaatgtagcacagctttacacagttaaagtaatattctgtaatattctatgatagtagatgatatatcaattgcattcagtaaacataggtaggtagaaggtgtgatcttggtttttttttttgctatgttgatttatgtcttaacagaatcaaagagtcttcgggatggcagcaagtgtttacaagcccatatctggactggaccattgaaagagtggctttaaatgcaaaagtggttggaggtcctcatggagacaaagacaaaatggtggccgtggcctcagagagcagcatcatcctgtggagcgtccaggacggaggaagtggaagtgaaatcggtaggagagttttccatggtggtgggcggttgtccatgtaagtgagacagccagctcggcctgtgacacttcctgctggggcccggtggccataggcctactgagtgagaggatggtgtgtcagagggagacactgacgcctcaggagggagccctggggttcagtttgctctgttcaagcctggatgcagcacagaaagttgctccttgctctcagttccattgagtggtggctgtttccctccactctccccctctgagggtgggtaagtagctcatgttgtcttgtttctatagcaagatttctcagaaccagagctctcttaggttagtcaagaccagaaagtgtcatcgtataggttgttatctattggcattcaccttgctagaaattaaattcacagttttaaacactattgatataaaaaaaatcagcagtactaaactcattgaatggtagttcaaattacatgttaacaaaagagatgttttccaaaaaggaaacttgtgagacatagatctccatgatgtctttttaaacttttgtttcatgtgtatgtgtgcatacatgtggcttctgcctatgtgcgtcagtgtacatgtctgtggattttcaggaatacgtagggtgtcctgccctatcattctctgccttactcccttgaggcagtcattcactgacttggagcttgctgggtttttcctaggctgagcagcaagcccagtgatcccactgtctgcttacatcctatcgctaaccctaggttacaggcagctaggacatttttctctctgaattttcaggtgtgtgctgggaatctgaacttgggccctcatgtatattcagcaagcactgttactcatttgaccctctccatagccctgtgcaatgtcttttgtaatttttttaaatatcattttttttaaagatttaggtatttattatgtgtacagtgtttctgtgtacatgtctttctgcaggccagaagagagcaccagatctcattaccgacagttgtgagccacaatgtggttgctgggaattgaactcgggacttctggaagaacatccagtgctcttaaccactgagtcatctctccagcctcctcttttgtaattcttaagtctgtttctgtatttagttttctgtgatacattgtttttgttgatatgtacaaagacagggtggcctgaaacagataaacagttgggaaaacttttttattttttgaatcctttcagataactgtggctctttcccttgaatcttgcaccagaattgtgcaacttttctgactgctgaattgaaacctaccagcctgctttgctcttcgaatgtggtctttactccaggcctggatctggagtactgtgcttgtcagttggaaatgttggcttgctgagttaggcagcttctctggacactgataacattcattgtaaacgctgacaccaggccttacatgagcactagtcacacatttgactccctgtgttaggaagtggtcaccttcctgtcaggtgaggtcttcagaatactcatcttcacctgaaacttcagtagtggttttccatcagccgtctccccacaaataatgacacagagacttattattaattataaagcttggcctatggcttaggcttgttcctaactagcttttataacttaattttaactcatttatattaatctatgttctgtcatgtggctttacctctcttccctcttgtaccttctgtttcctgtcagtgtccgaggctgtctaccctagattccccctcctcctcttttccctggaaatcccacctatacctcctgcctgcctagctctcggtcgtattggttttatttcagcattcacagtaatgcaccttcccacagtgtacaaatatcccacagcacgaaactggctttttatagctggtaacaagtaacatctgatgttttccttgaattaggtttgttttgtttatttctggggaacagtgtgccaaataccaaatctctttctccaccttctccctctctccttccttgtttcctctcagtgagggtctgaagtcttcaagcaaggcatgccactctgagatggcatcttatctacctgtggctcttgggacttcccaccattccataccctcatagaaccccttcatttatcctttgggtgtctttagtgaaacccctgtgtaacttctgtgccccacccccatactgtcactcagtggccacctctgtatggtctccacccccacccccatgctatctctgtggtgatgtgaccttagcgaaacccctgtgcaatttccgtgtgtgtgtgtgttgtgtgttgtgtgttgtgtgttgtgtgttgtgtgtgtccgtgtccgtgtccgtcccaccacacagtgttcatctctgtatggtgatgggaatcctggaatccaggaagacagagttgcctgaatcttgagtcctttgctgccttttgttcattgctttaaatgtcaccttgtattttttccagttttgctgttagtgttttaaagtgtggaataattgaatatcatttgtcctatcatggttgatagtatggccttctcccttcagtttgttagaaaacaaattttaatgttaagtacacactgccatgctggctagtttgatgccagcttgacacaagctagagtcatttggggagagagagcctcaggttggcccgtgggcaagcctgtggtacattctcttgattgatgattgatgtgaagggtcctggtcaccaccgctgggcagtatttaagaaagcaggccgacaagctgtgatttactcctcagtttgtttccaaagactagcgtgatagggagccgtggtaggagctggtcccatagcagttggttcatgtcctgtaaaggtagccacttgtgtgctgtccttcagaagttgacaccatcatccagagagcattattggctggtgggtccatggtaggctctcccgaggctgaagctctgccctgcaactcgggggacgctgcaggactgctgcagcaggtagtattgcttgtgtgaggctggatggaggtcatcagagctcacgctgttgccctccctgccgagacagtggtcaaggtccttgagcctaagtgggagcgacacttccacttcctgaggccattcacattgtcgtccttgatttcccaaaacctcacccttctcctgaggaaaagcagcttgctttaatttctgccgcaggactgagtgcaattggcttcaattgttttagaagtcgtcctgcctcagagccacagtactgctatggtaatacttgtgtataatgtagggttactaccttctgctttggtgctgtttgtttctttatctgtttttgtcaaagggcagtagtggtgatttatgtatcttgtagcttactttgctctgtcttggttggcaggtgttgtagttgtgtgtctgatatgtaaaaatgtatttatacagacacttacatatgtaatagttcccagctggatctcagattctcttctgagttttggctttatccatttatgtcacctttcttactgcttgagttctgacatttaaaatacgtgagtctgagtggttacaggcgtgagcatgtgtcatgttgcattgggctccaggcacatcttttgggagtccgttttctctttctattgtaggttttgtggctctgactcaggttgtcaggcctgcacttttctctcctaagccatctggctggccccaagactttcttcgagaatgctttagaactttgaaagtgcagtgagatgtcctgaacacaaagaaggtgcccaatgctgctatgaggagaaatagtcatcttgtctgggttgtgtttttttaaagtacaccttgtttcctcccgagttctttaagggcccctgagtctttgttttggtagctaaatgttgaaaacattcttcacattggcacacgggcacttctgtaatggcccacgtaaagcagggtttatggatggactcagtttccccatttgttggattcagaaacattccagaggtgtttctcaaataagatgttttattgtcaccatttagtgtctgagcacaccatttttatagtgaaaatggtgccagacatttggcttgagcttttcatagatggtagaggaagaacaggaagtctggcgatgatggtaactcatcagagccaggcttcctgtccagacactgctggagacagaccagcgcctaggcctcacatgtcacctgagagcagccagaagtcttaactcttgccctagtatggatgtctcttcgttcacagtgcctttttcttacagtttaactgaccctttctgattctccagcttgatgacactgtagacatcgaaaaactgaactcacatgacttgttcctcaaccatctctctctctcctttgtccctcccagtgttggtgtccctgtgcatccatccgttgtattagagttaataatgcactttactaaactgtaagtcctgctaaaatcagtctcttgtgtttctttttctagaaaccctccgctttacacagttcatttttagtctttatgagtgaaatgtaaatgctggaaagtgagttaaaataaccctgtaattgaaggctcaaatgcttgtgttgactgcatcctgactttttggtcttctgtttgcttctttctgcatttttagacaccttcaggatagttgggttgccaagtgtttgtctttagtcagtgtccccaagatctagtccatggcagcctacctttgaatttccagcagctcttaccaggtcttgcataatcccaaagtcctttctattcctgcctataagactgaggacggtgagacagcacagctatgggagaattctgggcagtcccctctgcttcaggagttcagaaaggcttaagaacttggaggttctgtcttatttctggttcctagtgagcatagaacacaatccataggcttaaatcagtaaccgtggagatggttttaatctaggttgtaactgatataaaaatggtgcctgattaatgtctctgtttgcttttgcctttgaaggtgtgttcagtcttggtgttcctgtagatgccctcttctttattgggaaccagttggtggccacgagtcacacagggaaagtgggagtgtggaatgcagtcactcaacattggcaggttagtctgaattaatgctcattatagaagtgaccacagtttcatgctcaaggttggtcaaaccaaggtaacaaggaagctctgggaaggcagggagagatacagggacgccaggggcctggagggaacgtatgtggattgataaaggaaaggactgggaagaacgtggtggtggtgtgcggttggtgtattcctcgccgtccttggcgggcagcctgtttagtctcttgttgagctgacttgaaaatgcagccagctttctactcccctggattttacatccataggttcggccagctggattgagagcattccaaaacagaattggcattttcctaattattgtccctaaacactacagatcccagcggattgaatagcattcgtattagaaagtgctagggagtcaagagaagatggagtgagtggatgtgacctgcaaatactacgtcttgttatatttgtgcattcagggctttggtatgttgcaggtcttggaatgaacccagcatgtagtggtgaaagcgagccctaggggcatctgtgtgggcatgcaggcattggggatagaaaatagcaaacagttcagctgagacagatgacaagatactctgcagaggggaagagtgggctccagggatgggacaatgattggcacgaggttctggaggaacatcctgagaccttaggactgaggaatgggagctggtgacagtggacgagtctcagttaaggggaaccttagtgtggggagaaggtttgaatttcagtgcagaggcagaaatcggggttgcatagacggggtaacgagtggagcaaaggcattgcagtggttgtcagtgtgacaggaacaggccggggaacatggagacacactgacacgggtggaggggaggggagctggcaggctcttctgctgctggtgcctccctgcgagagagagtgaggtagggagctgcactgtgtcagctgtgctacagcagagccacgtggtccacgcatggaagcgctgtcccgtgaccctgacaggagcgctcctttaccgccttctggcctctcactgttgtcagaaatatgcataaaggtttttgtagctctgagatccagactcaagctggtcacgtcttgctgatcttagccttgggtgttttgtctgtcacccagttctttgtgcctggtgcatgtgtggctgaaaaatatatctgacataaggatttgttgcacatttcagaaagaccctggcaaagttgtcttccccatagcaaacgagctttatcaaccagctggatttcacctagtgtgtcttggagatgatctgttgtgtggcctcagcctcctgtctgcagatgttaatagacagctctgactagaggctggctcccaggactgccagcactagatgacaaggttctgaggtggccttgagcaacattctggccacaaatagcagaggaagtgcacagggcaaccctgagttcttggctttaaatgtccatggatttgaaatattagtcactaagcttcacatctgcattttatcttagaaaacattgtaaacttcatagttttctgtcagcatctcaaccctgccttaataaaacgctgatgaaatgttctaaaaaccattctagtcgagataagaaattggggccttattcctcattccctgttagtttaatctctcccttctcctgcagcacagcacacacatgtagcatgatgtcacaaagggttagtgttatagtgtgttcattagtgttgtcagataggtggctcagcctaagcaccctgcagagagcagcaccctgtaggcatcattcccaagtttttggagtttaaattagactcaaagacagatttaaacaaagattgattacatgcttaattctcatatcagaacacggaaaatcctgtggatatttgtgctggacagcaactgtggggtatatatacttagcctcttaaaagatggagagtggccggtggttggtggcgcacgcctttaatcccagcacttgggaggcagaggcaggcggatctctgtgagttcgaggccagcctggtctctagagcgagtgccaggataggctccaaagagagaaaccctgtctcgaaaaaacctaaaaaaaaaaaaaaaatggagagtgtttcatgtgttcattgtgaggggtggggactcacagttacagttgcttcagtggtgactcaacagtggagatttgaggacgagacactgaccccagcaaggatccagagtgaactcctggtggctttatagagtaggctggacctggggaggggtggggagaggtggggagggggccatcttcctgcagaccagctgacagcattttcctgaggtgagccttgctctaggccgctaccaatctcaacaaaaagtggctccaaagggtggagtccggggctgacccgtctgcttcctgccatagaaacccaggtgtaggtgtggaaggtgcagtgctgaggctggagagatgccgccagctagagccagggcatgggagagaggaggcgaagctccctttcctctgacagccttacttccagctcaggagcacgggtagtgtcaggctatgtggggtgctccatgctctccgagaggactgaccctgattgaggtgagatgctggtgttgtctgcaagacttcctagtgcagcttgtgactagaactgaaaacatgcgctcagagcagaggtccctacgtgcaaacagcttagaggaagccttcactccaggtgcctgttgtgtagctggagtggcctctgctctgcctgctcttcgtgttctggaagacgcttctcttggtgtggactgatggagtcccactctctagttcctctcctgaccactgccaccccctcccattcccttccctcccctccccttttctcctctcctctgtggttacactacacaccttgcctctgcctgacaccagaattatctgatagttttccctctctgtcggagtgcatgcttccttagatgggctgtagcacgaacataccgtgcacacatgaagaggactccatagacctccttgctgggaaacaagaagggctggatcctcagtgcagagttaatggccaggcgtctgtcttggcctcctgagctcacgactccacaacatggagccacactctcttgcctgcaatagacatttagtcctgtgcctgaagctgccgctctttggtttcctggttttacttttcgtggtaacttcactcctttggatttagttacttgttcgcaaagtagactgatggctttgaggaggcgctgtttagttgtagcgcctggaaagcgagtcacccgggaagccgcctcggtaaggacagtataaacaggacactgtccgcttgaagagactgtaacaggttgtctggcggctgcactgtgaacgtcacttgtgctgctctccagctctgattacgcaccacgtggctgcagcacttcatcttatctgagggagatgggagggaagcgtgaagtttgccttggccttccacttctgggggctgtggtgcagctgatggcagacaggaggaacatgtgaagcagctgacctgggagagcacgggctgtgtgtgtgggatgcagctaacatgtgtcttcacagccatctgggtgcttcccgggtcactggggctgacagacagctcattacctaagccttcctaaacacccaaagactcacaaaagtgtggaaagtggcaccaggacccatcccagtggcatgtactggccttttggataccttcctcagcttcgatacagggggaatggcttggtcctgcctcagcctggcacatcagactttgttgactccccaaggaaggccttacccgctatgaggagtagatggagggggggaactggggttaatatcgaaaatgaaaactaaatgtttttaaataagaaaggatacttcctaacttgtaatactgtctccgcatcaggtgcaggatgttgttccaataaccagttacgacactgcgggctccttccttctcctgggatgcaacaatggatcgatatattacataggtgagtgtccagcgtgctttatacctgaggacatggagacctcgccccctgtggctctgagtgcatgtgttcttgtcttcagacatgcagaagttcccattacggatgaaggataatgacctccttgtcactgaactctatcacgacccctcgaatgacgccatcactgcgctgagtgtttacctcacccccaaaacaagtcagtacacggccagccttggggctattgacgagtttactgttctagaagatgccttgtaatgaaggagtgccgagaaatactagcatgttaacgtgtgcctggggacagactgtgtgcttgaatgcgatgcttgtgcacggcatcattttcctgaattcattagacaagacagtcatctgcactaccgggtgatagtgctaaagtggctgaaggcttagtcagtttaaatcgtactttctagactggggaccgcaaaacctcgggttgttactcatgctagccctgtctcttcctccctcttctctcccctccctccctgttttcttttttcagtagttctgtgcactgtccttggctgctttcactgatagagctgagaggttgtgacacagtgtggaaaggagaatttaaaacacttaattactgcttgtccctttagagaaagcttgctgagctctgctctgggatgaacagaatgaagtatggattcccacccagtctaacatacagtaagaggtcaaacttggaaagttctagaaatccaagtccctcctgtggacaagcttaggaagcatgagaatggcgtctctgatctgctggagtgtccctggagtgtcccgatgtgttctgtgctctctccctttgactggtgggtttttcaggtgggtggaagtgaagcccacagttttccacctgtgaatcgtgttagaatacagagcagcaagtaagcgcctgtctgccttctgatgtgtgctgggatatggcacctgttagaaaagaaaagaaaagctaccagggcaggagcgccttgttgctcttccagaggactgaggttttgtccctggaactaagacggcagatcacactgcctatgactctggttccaggagagctgacactgtcttgtggctgcagaggtaccaggcatgtatgcagctgatacacagatatgcatgcaggcaaagcagccatacacataaaataaaaacaagccttttgaaacagggaggagagaaaaagaaatgcagacctacagctgaggcagctggattggaggaggcatcatggctgtcagtgtggttgagcatggcaggtggcttgcctgtccacttagtggtgttggcaattgtttgtgtaggtgacacctggctcaaggatggctcagtactgtagcagcagtaaaaagcccagaccactccgagctgttagtccacggaaggctgctgtggggtgctcttccactggtcacctggaacagcagggtcattcatattctaaatcgtactgagggagtactatgtctcggccattctgagggctgcttcagtttgtcagcaaggagcagaggtttctagtacctacctacgtacatcgctctgactccagctctgcctgtgtcaccacagcgaggcttccaaggacagctttccttaaccatcatacaacaacctgcctttgcactgtggctcctaggtgtcagcggaaactggattgagatagcgtacggtacaagctctggagccgtgagagtgattgtgcagcacccagagacagtcgggtcagggccgcagctgttccagaccttcacagtccaccgaagccctgttacaaagatcatgctgtccgagaagcacctggtgtcaggtacagtaggactcctgggacgcctcgtgttacctgttttcttttgtgcagatagaggaagaggagtggtttatgctgggcctttataactggaggggtgtggctttgagttggcctggatgtactgctcgtaaacttaggaaataccatgtctctgctcattctctggtatttccttcttatggcaaatttcctctcaagatgcgtatcaaatcactgctgaggagacttctggttatcttcagttttaagctaaagttgtaaccttagatgtatattttgatagttgattaccttgtaaaatgttaaaaattcataacaatatgtaaaattatttgaagtaacattttgggggtttatagttccctataatcacaactttaaatatttaggtaatgtagtaaacaagatattgctaattttatagcttcatgaggccactttttaacaaaataaaattccattgaagaaatacatgtgaggaattcctgcatgattcccagatttggtgaaatttcagctctgagttgtctgcagccttgctcttggggagcctgtcctctctgtagcctgccctctatggagggatcattttcatatgttgactgcgtctgtttgaacaattctaagagattttgggtccattgctgttttccctgagttctgggcagagctatcccccaagtgaggccatagcttaacttctgtcaggcacctcactggtccacagatgctattagctcctgtatgctcttaagaagcagcgctcaccagacactatccagtcctgttctcacttctgttgctggtcccttgtttgtctgagagtgcttttttaggctctgttctttgtatgttctctggtgatctgactgctcatcgataccatacatgctagtcccactctgacttttactctccgtcactacatagagaattgaaaacttctctgtcctgtttctgtgtctcacatattatgttcaacaggcatcccaaatcaagcctgaacaaagtaaaggttcttatgatagagatccaagaagacaccataatgtacagcatcaccatctaagtacttcactcaaaatttaagggttcccctgggctcccccttgcttttaacctgaatgaacccaatccagcagtaagtagttctggctgccatgtgtgttgcagaactgatctctcccattggctcaccatagtggctcaagtcattttcccctgggttactgcagctgctggctagttcatcccaggccctgtagcaatacagtctagatctgagttccgctggccttcctagtctatttagaataaatgtgaacttcagatgttctgtgtagcgtgtactatagatttgtttatgttctaatttttgtcctagtgccaatctactttctttggatcatgagactcttaagctattggcttttctattttgtgaaaatgccttagactttcttgcccttattttgtttgacatgtttaggttttcacaacttgtttggttgtaccatcttccagactctctcacacttcctccctgtttctccctgtccctcagactctcacacttcctccctgtccttcagactcttacacttcctccctgtccttcagactctctcacacttcctccctgtcactcagactctctcacacttcctccctgtccttcagactctctcacacttcctccctgtccctcagactctctctcacacttcctccctgtccttcagactctctcacacttcctccctgtccctcagactctctctcacacttcctccctgtccnnnnnnnnnnnnnnnnnnnnnnnnnnnnnnnnnnnnnnnnnnnnnnnnnnnnnnnnnnnnnnnnnnnnnnnnnnnnnnnnnnnnnnnnnnnnnnnnnnnncacacttcctccctgtccctcagactctctcacacttcctccctgtccctcagactctctcacacttcctctctgtccttcagactctctcacacttcctctctgtccttcagactctctctcacacttcctccctgtccttcagactctctcacacttcctctctgtccttcagactctctctcacacttcctccctgtccttcagactctctcacacttcctctctgtccttcaggctctcacacttcctcagtaaggtttcctagtccatgtaaaactaaccttgtttgcttgagtctcctgagtgtccttcacaggcttacggtgtgattgttacttgtttgcctatagtctctctcctctacagctgcagtagttgtcttctcctctctcttctcagcacttacgtgtagctcttcacacaaaggtgctggaaatgctgtatacagtatgatcttatggcatttaatctcttagctgtgccatgctggttaaacagcagtactttgagatcttcgtgactgtctttggtggctatgttagtgtagagtgtgatgccaaaacagtgcctaaagtaattgatatttcaacatagaaagctacatgtaggtctggataagcaagtttgtcaagaaaaacctcagtttaagcacatgtctggagtgttctgtgttcttagcccttctgccctctggtggctactggcgtaaatgcagtgtgtgctcctgtagttcactagagtctgacaggaggcttcacaggctggtgtaggaacacagttctgctcggacacttgagtcagtcatccaggatcgctccagttatttgtcttttcagtcccactaaatgtggcgaagccaggggtatttcccatgaggctggtaaacaccactctttgcctcctgtacttc

SEQ ID NO: 4 - DNA, 34105 bp, Cricetulus griseus
  >scaffold_1 dna:scaffold scaffold:CHOK1GS_HDv1:scaffold_1:96135496:96169600:1
  misc_feature 540..639: /note="n is unknown"
gtccctactttccatggcttttgttcagaggtctgggctctagaaattctgactcactacacctgcgatccacactctcccctctccatacacagggagcatgggggagtggggggggggagctgagcacaggcacagcacccatagtcactctcagtcagctgtcaccctgtcatgagactagccagcccgcctgtgtggcctgaggagcagacctcccaggaagggtcaccacagctggccaccagcccagctccagccccatgcatagacagggctgtgtgtatgagtgtattttgagatagggtctctcattggcctggaattttccaagtaggctaggctggccagagagccattgtgctgggatataagtgtgcactacaggtagctagatcctttccttacccttctctccctcccctctccctccactgcctcacctgtcccgtccctttctcccctcttcccagctccctcctttctttacacaggtgctgggatttgaactcaggccctcatgtttgttgagatagcacnnnnnnnnnnnnnnnnnnnnnnnnnnnnnnnnnnnnnnnnnnnnnnnnnnnnnnnnnnnnnnnnnnnnnnnnnnnnnnnnnnnnnnnnnnnnnnnnnnnngggatataagtgtgcactacaggtagctagatcctttccttacccttctctccctcccctctccctccactgcctcacctgtcccgtccctttctcccctcttcccagctccctcctttctttacacaggtgctgggatttgaactcaggccctcatgtttgttgagatagcacttttttttttttttttttttttttttttttttttttttttttttttttttggtttttggagacagggtttctctgtggctttggaggctgtcctggaactagctcttgtagaccaggctggtctccaactcacagagatcctcctgcctctgcctcctgagtgctgggattaaaggcgtgcgccaccaacgcccagcaagagagacagcactttaccctccgagccacctcatctcctcagccctttcaccttttcttaaggacactggtcagattggattagagctcaccccatgcttctcgttttagtgctctaacagccccagtttccaagtaaggttagcatgaggcttggggctcaggctgcatggttggcccacagcttctcagcccttcaatttgctttccagccagtgcacagtgcctctaggcagcacagggcacaggctgcagggtgcagccccagctgtgtggtggacgtgtaccccccccccgagaattacagcacagcagccagacacgggtggcctgtgcccatctacatgcaggcatgaatcccttcactttggaaggttcagcctaaaagtctaacagcctaactgatgtcagtattcgtaaaagtgtatgagagagagatgctggccagaggagggcgtcaggtgccctgctcgttctctgatactatccccttgagactgaacctgaactaggttgatggcctacactgctgggttctgggggttcaaattcaggtcctgatgcctgtgcaatactcttatccactaagccatctccctagcccaacactaaactttaactgcatgcgtggttcatgtggctgtcctagcagggtgtccctgtaactctcagggactcttggtggatgcatattccctccaagccatccactgccctaccagggacctcacagactaacccaggtccctcctctccagccccacacaggtagacctcatctcagtgattgactcctcggcccagggagacccctcccaagtggaagaagccagaccacctgctgctctgttggtcctgcctcagcttccacagcaggaggcccaggatagagacatggagctgacagaccttctgggcatgagaggagtggcagtgtggctgggctgcaacaggctcttcctcccctaggactttgtattagaaagaaaatgcttcagaggtgtgaagaactggaccccaaaacaccttcccgggagcaacatggaaacctctcaaataagttgtagtcaggcacagcacagccttggggcctcattctttccaggtgcaaataccacccgcctgcccagtgtggaagacagctgtaggttcaaattctggcaagccatgtgtgctcatcctctggagaattggcatattggttgccttggctccttgtgtggtgattttgtcatctggtgtgtgtgtgtgtgtgtgtgtgtgtgtgtgtgtgtgtgtgtgtgtgtgtgtctgtgtgtgtgtgtgtgtctgtgtgtgtgtgtgtaggctggaagtcaggtcccttgccctggggctctccactgcagtgtctgagatagagtccctcattctccattcagttagactgtctgccaccaaggccccgagcatacccgtctctgcaccactggttgggtcagagacactaatctccaggcccacctttttacagggttgccagggatttgaactcaaggccctcatgcttggacaacaagcacctcacttcgtgagccatcttcttggcccctgcaggtttgactcctggcattccctcctcagagatgagtctctgtggtaatgaactcagcagcatgtagaaggcagatgtttatccctcgatcgtccaaaaccttcaggacaccagagcccatgcagtgagacagccctccctttctgtgacaaaatgcccaaggcaaacagcttagacagagggatggctctgttgggaagtgtgcattgtactagctagcatgagagcctgagctagactccctggaacctccttaggggacccttgcagtccagcgctggggaatggtagcagcaggcctaatgagtgactcggtgtcagactgctctaaagtagattggccctaagagttggcacttgcctttaatcccagcacttgggaggcagaggcaagtgggtttctgtgagttcaaggccagcctggtctacagagatagttccaggtcagacagggctacatagagaaaccctgtcttgaaaaacaaaacaaaataaaaaaataaataaaaaggaaaagaaagaaacctgctccagattaaccctgatgtcaagtccactgggtttgggccctgggcaatgggctttgaagggatagaagtgcagccacagtggcttatgcctgtcatctagcaggctactacctcagccactgtagtactggggtcacagagatctgtaataagtatggattcagttagatttttattctttcaagacagggtctcatgtaccccaggctggcctccaaatcgctacatagcagaggaagacttggaactggcccttctgcatcctcttccctgagtgctaagatggcttttgagggccagactcagcttatggggctctggggacagaggcagtttcatgaatactacacaagtgctcttaacagctgagccacacaccccgggtatttttgttgtttctcttttcttaggacagtgtcttgctatgttacccaggctagccttgttaccttgttaccctcctgcctgagccttccaagtactgagatgacagatctgtgcctccacccttggcttgagtgtctattacaagttacctggtctctggtagttttgttttcatttgtttgagacatagtctcaggtagcccaggttgacctagaacatggtatgtagccaaggctgaccctgaattctggatcctcctgcctttacctcgtaagtgctgggatggctgatgtaggccaccatgcctaccccacccccatctctttctcccttgttcctattttctcttccagttgctctcggttctccatctttcttctgtgtacctccccaccgtccgtccttcctagtctcatttccagtcagcagggatgtgcccatttttccttatttcttccccaggttgcctggacgggtttaaggatgtccatggctgggagggtctttgtttctggtgtgctcaaaacatgtccacctgccgccatcaccacagcctcctctgtcaatgagtcaagtcacagagaaatgtggggactgatggagaagcagccacggccaccaagggagaggctatgtcaagcctcccaggtgccgaatgtccatttgtggatccacacaaagctcactccgggagctctgtcctcattgtgttttcctctcagggagtcacaggctcccacttgtgtgtggaggaagaatgttcagaaacctctgctttggggtcatgtgtcatgtgttctgaccttgcacaggcaatgagaccagactacctcacatttgaatcggcaagaaaccaccccttagaagctgtgggcatcaatgtggccgctcaacctgggcatcttaatgagaaagaagtagaaagacagcagagtgcaaggaccctatcattttctgttgctgtaaaaaaacatctaaggctgaggaacataaagttcaattagctcgaatttaagatcctgttgattaaaatcccctcgtcacccaagagtcacatggcaaacatgaaaggatggaagcagaaagagacaactggcctgggctagccttggacctggagatcctgcctcagtctccccagtgctattgtgacaagcatgcctcaccgccaggccttagcttggagcccactgtttctgctatgctggatggccaggagcccccaggatccactgccaccacccgcagtgctgggtcacagggcagtgttgcttctctggactttacccatgagcgctaggatggggcgcttgtgttcactgagtgtactgcccactaggtcatctccaaactcctaaattccacagttttcttttgcttttttgggtgggacagtggtctatgtagaacaggttggccttgaactcacagcgatctgcctcctaattataaagagttggtcccacaatcatgcttttttttcttttttggtttttggagacagggtttccctgtgtctttggaggctgtcctggaactagctctggtagaccagtctggtctcgaactcagagatctgcctgtctctccctcccgagtgctgggattaaaggcgtgcaccaccaccgcctggccacaatcatgattttaaaggtcagctgtgagcagtgggggacagatctcagatccacacagccaccacagcagcatgagcattttgcttaatatttgggggtgttggctcaagcacaccaagactctctgatccaggaaagaactttgggatgaaacagctggcttggtactagaagacattgtaaggacatttgtggattcattgattatgtactggggcacagggagagattggaggacgacgtatgtaagtcacctccctccagcacgagagtcccagggatggaactcagttcttttttgttgttgtttgttgttgttgtttttcaaggcagggattctctgtgtagctttggagactatcttgacacttgctctggagacaaggctggcctcgaactcacagagatccgcctgcctctgcctcccgggtgctaggattaaaggcgtgcaccaccaacgcccggcaaggaactcagttcttcaagcttgcaacaatcactttcacctgctgagccatcttgttggtccctaaaagaattttatttatttatttatttatttatttatttatttatttattttggtttttcgagacagagacagggtttctctgtggctttggaggctgtcctggaactagcttttgtagaccaggctggtctcaaactcacagagatctgcctacctttgcctccccagtgctgggattaaagttgtgagccaccaccacccagcaagaatttcttttttagccgggcgttggtggcacatgcctttaatcccagcactcgggagatagaaggcatatttctgagttcaaggtcagtatgctctacagagagagttccaggacaacccaagctacacagagagaccctgtctcaaccccccaccaaagatgttaaacatgagggctaagagacaccccccacccccgctagcattcgggtgccaggtgctctggggagccttggctctgagtcttcacaggatctgggtggattctgagttcacagggggaagtgtccgtcgccccaaccccacccccagacactggggcatccacatgagaacaaccaataaaaacacctggctcccagctgcagtctggtaagacatctttacttaccaaaggtcttgctgaggttctcagaaattgtgcaggctgaccagggaaaagggaccctgcccaaggccacatacattcaggacttcagcctgcaccactgttagcttgacatgaagtacggactcagggaaggagggctggtgggagtgtgaggatggcaaacataatgacctgagttgacccgtgggacacaggaggtaaaaggtgaaaagtgacacctgcaagttggcatctatatgtgtgtcctgacatgcatgtatggcaccctaaaggaagaaatgcaaaagaaataaaatctatgtaagaaatgcactgtctcaagctagtgagaggctcaggactctgagagacccctctttccttccctccctccctcaagtgttccacatttttctgtgctgcctgggcaccacttcccagagtccccttgccgaggaccgggcttccatctcatagacccttggggacacactccttaatctccaaagcagggtgactactgaagggctgcagttggtagaagcgcggattctcgttctttcctgcacagcgatttgcctgcaagagtttttacaggtgagtttgtgggcactggggggctcaggagggcgggcagccaacaacccggtgccatggccctaggcttccacttcctcaagatatatttattttggaaacttcagtccagggacagggtctatgatcccgctcagggtctgactgaaggatttcacttgtgttatcccagcagcagggggccatggcaggaaaatcatcggcttgagcagcctggccttcataggaggatctagtctagcttgggctaagttacttagctagaaccttagcaagaaagcttaggtggctttgggtacatgcacaagtaaaccagtgctcatcagtgcaagtgcctgtacagtaagtgagtgaatgaatgaatgaataagtggagctaaggttggaggggcccctgagtctcctgcctgccccttctcacaacttgtgtcccttagttgtcagtgttgccccaccataataaaagctgtgaaggtcccaagtttttacctgttcatatatatatatatatatatatatatatatatatatatatatatatatatattgtgtgtgtgtgagagtgagagagagagagagagagagagagagagagttagcttagcacacacccagcaggtggagagacagacagagacagagacagagacagagaggagagagtcagcttagcacacacccagcatcccacactagggaggaggagaggagagggagggaggagagagagggagagagagggagagagagagagggagagagagggagagagagagagagagagagagagagagagagagagagagagagagagagagaggaaagacacagcttatcacacactcagcatcccacactagggaggtggaggcaggaggatcaggagttggaggccagcttccgctacatagtgaatttgggtacaggacactgtactccccaaaacagagaggagtcctgagaggaggctccaggtgaagagcaactgctgctcatgccgaggacccgagtgtgccagctcacagccaccagtcacctcggcgccacgcgagccgacgccctcttcgggcctccgtgaacactgcatgcatacgcaccgacaaaaatctttccaaagaggaaagggttttcagtctgtggaccgtgaaagaacgggcggaaagccggagtccactgctccccttagatggtcagcgcctccgcatctggcagagtagtgcactttaacttggaaaacacgcgctgccccgacgcgctcctcccgccggccctcgcgcgcctcctcctaaccaacccagagccgcgcgcctcccgcccggccacaccctcccccacagcgattggccaggcttctactcaggggcctacccttcacccctgacgggcagtacgaacagccaataggaagagcgcccgccctccccgaggccgttggaggagggcatgggcgggccgttgggggggcggggcgtgcagcctggtaaccgttgccgggcgcaacgccccgccccgcgagggctgcgcgaggccgaagcgggcgggcgctaggtgcgggcgggagggctggcgggcgggcggcgggagccggaggaggagcggccggcgccgccaccgccgccgccatagatactgtagccgtggagactgttacttgccaacgcggagcgacacgcagcggctgccgccgcgggagccgctacccgaactccccgccgaactccaggtgagcggtgcgggcccgggcagggggcggtggcgggcggggaccccgctgggggggtcgcgggggcgggcgctgcgggacccagcgccccaactttgcagatgccaacctcgcctacttgtgatcgcttctctgatttgggagagccctgggctgagggaacccggctcacactcttcaaagtttgtaaagtgtagcgatcttttctcggcgtttgacgcactaaatctaactttgaggggcggggactccagaggaccccccgtctcttatttttagtcagaaacgcctggagtgcggaggcgcccccaaagtagctcctcactctcattaccccaaagcctgggattgggggctcccccaaatttgctctttactgtcatcacccaaaatctgagttgggggctgccgcagagccaggcatctccccacgtctgaagacccaggggcatcgatcgccttccctttacacttgtgaaatctgggtacaccgggacccccgcttcatccctgaacttgactccgagggtagcctctgtttgctccctaagttccgagcgctcggtttcctcctgactcaaacacactggatttgggggcaccgatccccccgcacccctttcttgtgccttgaccaaaatagtcagtgcgcttgtcctggaaagggttcctccccgttcgcgctctattgttcaccccaaagttccccggcgccccaggtcctcggaccccctcccccgccgcgtgaaaccccgcagcactgcatttgggggtgtcccggggcccgcggtcctttcccacgccgccccgggaagctcacgcgcacccgcagctccctccttcgccgccgggatccgcaatcccgaaaactttggcgaaggaaaccctcgtgtgggcggtttgcagaaggagccgggaggccgggggagtgcgtgcgcaccggtgcgtgtggaccccacccgagcacacgcacgctcgcacaccccaaaatacccgagtctctcgtcgcccctccccgaggccgcgttcgcagccgggattcgccagggcagcggttgttccctcgctcccccacccccaggcattccgggctttgctcgccgctttacaccggaatctggttccgccggggaaaatcctactatgattgggtgttagacaactttattagcatgcgttacttgtgcacaatatggcctctgacctttccatgcacgtctgtgttctgatcataccccacccccactcacccctcttactcccgccctctcctgatgacacctctgtttccgtccagcccctcttctactttttgcctttcttttttcccttgtagagagtgagttcagttggggttgctctcagaagcgcgggggtggggggtggggggcctgacaggtggccaccaccccaaggacagtggcccctccctccccggcacccgcgtcactgcctgtaggtcctcgggcatcagatgattatggtcaagtgattcacttttctgtttaactttttatatgcatttatttattgtgtgtgactgactacacacgtgcgcacaaacacgtgggtcccgggaccttgggtcagcaggcttggcgccaagagcccttacctgctgagccacctcccggctggctgtggaatgggctttaatttaaggtgaagtaaaaatacttccagggagatcatggtgtttaataataaaataatgacacggaactttttaaaaccttttctgtctgtctttttaacctttatggccagcctgtggagggtgcttgtttgataggagggtcttgactgagcctagaggctgtccctgcacttcctccctgtcgggttcaaggactggaacagactggaaaatccagccaggtgtagccactggcgccctcccattaaagaagtgagagctccggcctccgggaaaggaatctaaggctcctaccaccaggccaccatgtccttcacacttaccagttaggagccaaggagcggattttagatacttttttgactcagtgatggtttttcaacccaatacaatgttctactgcctgtcttgtgggttcctgaggacccagagccccagggccacaacagggctgtgaattacgtcaccacactcagcctttaaaatacagttcataattctcttactgcatgaagggtccatggtgccttaaattgcattagtagggatatcttttttttttttttggttttttcgagacagggtttctctgtgtagctttggagcctaggctggccttgaactcactaagatccacctgcctctgcctcctgagtgctgggattaaaggcgtgtgccaccaatgcccggcagtagtggtatcttttaaatctttattatttcagtgtgtgagcgtcacctatggtgtgtacatgtagaactcaggggacaagttataggaattggaattggcccttcacgtgggtcttgggtttcaaacaaaggttatcaggcttggcagcaagcccccttccagtcccattggtgatataaatattcacatatgttaatcagcatacactaatatattcatatattaattagttcatctataaactgatgattgcttggcttgttaaatccttagctagaaggaattatgtttttgttttctttatttccttgtttgcctacttacttactgaggtgctagactttgcacatgctaggcaagcattctgctgccacccaggcttcccagccccagttctttttattttactgtatttttttgaggcagggtctcactgtgtagaccaggctgtcctggaacttgctatgtacaccaggttggcttctaatttacagaaatctgcttgcctctgcctccagagtgctgtgactaaaggtgtgtgccccccccccaacgttttactggagtttgagtgctgtgtgggactccccagcccacctatgtccagattagtgtggatggatggctgctcctttgtacattgttcttcatacttgaggtggccaagtccagctccccatggccccccaagtccattctccccactttactgtttccatagtgagcagcagctgggcagtcagattgtgaagccctctagctgacctaggggccatcagcagcttccttagcaccctgtccctccaggagccatttgtctccatactggaaatgacagcgtttaacattctgctgtcccctctgggcttctgtccagtgccccatgcactgtgtgttcacatttcagtttattttacagtgctagggatggattcaggaccttgaatatgccagtcaagtgctcaccactgagtatgaccccagctacaaaaaaaaggccactggagtttaaacctcaccaccaatgttgactgtcctccctctgaccctccccccccacttcaggcatcatggtgaccatgagtttgctgggtggcccgctgggcagggcagctttgacatctgagatcaccaactttcagatgccaacactgtgatgtctggaagggagccattggaaggcaagctggccgggccttcatgccaggacttgaactcagcccccaggaccaggcaccaagccctgtacagctcagctctttcttacagccacattcctgttgtatgaggtgtggacctggcaggttctgccaccctgcccagtaccctggcaactctggcttctttttttgggcacttgtgaatcctgtgatttcctgccaagatggccgactggctcctaattccctatggacccagggatggctgctgctggggatgtgaatcccaagagctcactgattaacttgaggaatattatacagccgtttaaaatgtgtaaagtggagctggagagctggctgtcagttaaaagcacttgctggtctagtagaggaccccagtttggttcccactcccacacacagccctctgcagctccagctccagaggatctgatacattcttctgacctccacaggcgccagacatgcatgccatgagctgatgcatgcaagccaaaagtccatacacataaagttataaaattaaaaaattggctcagtggatagagcaaattcctggcatacacaaagccttgagttctgtcccctgcacctagaagaacagaaactaggtgtgtagagcaggcctatcaaccagcactggggtggcagaggaagaaagatcaggggttcaaggtcatctttggttacctaatgagctcaaggccagcctgggctacatgagaccaccccaggtaatgaaggtcagattcacagggtcaggaagtgcaaaggtcttggggtggagtgctgtgtgggatcctccggtacactcagggtagagcaaggcagctggctattacctggtgactggagggaggtgaagtagggggtggagccatggagatgggctggcaagtgtgaggtggaggtgttgagctgtttccaggaacggctgcctgcatcagtagctcggtggctcatgagatgccagtcgccatccccactagctgaaccctcagggtgcagaaggtattctgcctagagggccaggatgagtgggaaagtagccagagcttcagcaaatctcgaatggcagcagctgacggggagtaggacatggtcatgctttcacaaaacttccagagggtcttagcctaagaggggttgttaacaatgattcttggctcaaagcctgctggttatttgtaaattgggcggggggtggggagtggggtggggagtaaggctgtggtaggccaggttggcctcagacttgctgtgtagccaaggatgaacttcaactcctcaccattattctgtcctcacctactgagtgctggggtgacagtcatatgccaccatacccatttagacaaagctgggggtggaaccagggctcttgggtaataagcactctacacactaaacctttgactcaaaatctcatgtatcaagcagtaacagacatgggcatctgtgacacagtgtggcccttcagcttgagctgtgtctcccagacccttccccgtctctgtgtcttgatgggctggagtcctctggggtcagagcttctggtaactgcactggaggctgcagctgcagtgggagaggtgacaaggactgaggtgtctgtcccaaagtgctcttcagggcctgggtgctcaccacagtgtcccagtccttcaggaaggacagtgcccttcctgaaatgtatggcttcaggaccagcagagcctggcaattgagtgacctcagggatatggagggggtggggtgggagccagcaggggccatgcagccagctatgtgctcaggacactgaggggacggcagtgaagtagggagttaggtggggcatacccaggacaaggggtgggtatataagtcagaggtcaggcttcagtggtgtatgttgatgtgaagttcaagactggaaggacagtgagagggaaacacaggagccaatgatgctgactcacggctggcctgtgtcattgagacacaccgcccagccacatgaagaacatccgtccccttctgccctgctaaaagctctgcaggtattcaacaccaactcccagcccctggtaccactgtccctgctcctgtctctgtggatccaagggcattaggacatcctgtgggtgggcttccatgtctggctcattttaaatgagccattgtgtcccccatagtccctcttggctggtgggatggctgatcttgtcaactcgactgcagctggagttaactacaacctgagcagctgaacacacctgtgagggttttttttgttttgttttgttttttaatctgggcccacaccttgaggtggcttctctcatgaaggaagtggaaggatgcttgtgggctcacctgcactggcgatggcaagtttatctaccctgatttctgtcgttacaacccaacatggactaaagcctagaagctccagggcctccctggcctccagcactggaagggactgcagagatgtctggtctcagggacccaagaaccactgcggccacatcaggagacagcacagttagactacttggaccacagcctgtgagctactctaagaaagctcatgaacatgtgtgttcattttgtcagctctgttccttagagaaacctggaaaatcagccagatcaagtatcagagtttcttcattttcatggatgagtaatattccagtgtgtggatggactacatggtgcctgttcatccacctacccacccacgggctgccactgtttccatcaggacactgagtcacgtggaccgaggcctctgggcagaggaagctcagtagaggcagaggaggaagtcacttcccggattgaacaccaagaagacgggaaagatcaaagcggagaaatctaataagaggaagaggctgtgacccagaaagatgggcggcttggctcaatgtggaagtcacaggcatcaggctcagcgtcgccctgctgtcttgttccctgcaaaccgtttatccctgagaaacatcgcgctgcccagaatacattctgtccaagaggtagtctatgggctaggttccgggaagaagtttctatccgtctgtgtcaccgccagtctttctcacctctgggaggccacataaaaacacactggaaccttaggttcttaggacggtaaaggagtggccatgcttctgatttgaacacccccctccacacgcacagttttctttcttttttaagaacaatttaactgtgcattggtgtgaaggtatgaggtcccctggaacaggagtttcagacagttgtgagctgccctgcgggtgctgggaattgaaccggggtcccctggaagagcagccagccttaaccgctgagccatctctccaaccctcctttcccccccacttttctagaagactccttcaggccttccttttctgtccagtgttctagagccagtgtccactcagcaaatatttgtgggcccagtcagccaccatctgaggtccttaaatcgacggcccatgtttcagggtgtggaaagctcagcggagaaggcgctggggaggcgagcgcccggcctgtgctccaggagtgcgtgtgtgagcctaaagtgcctgcaggagcttgtgtctactcaagcacgctccttcctcacatgggccaaacatggcgccgcccgaacccgaaactccagtctggaaaagagtctccttccgctcagcttgcgacttccacttccgtctgtctggcccgctggaaacctatccttccgcggaggtctgcgatggggtggggtggggcggggcggggtggggcgtctcccaccctggggcaggggatcgaacccgggggaccaggcttgtggcctggtcctttattgctgcgccctgaggggctcacctgcacgctccgagttgagttctttgtgtagaaagtcttagtgcgcaagtgcagagggctgagcatatggtgtagggtattaagtgcttggttctgtttggccgatggcagtgcccagattctgctcttggtctagtttggaagtttccagagatttcgttgtgttttatattgaatgtgggccaaatgcagaccttcagaagacagcagtgccgccgtccgtctgtccatgcgtcccaccatctgtccatccctaaaccggagacttcctgttaacttcgaggaaaaggaagttgggaggaaactcccaagtgttgcgattttatttctttatttttttccatttattgagattataataccttattacatttttaaattttattttggtgcctgtgtgtgtgtggaagttggaggacagctcgtggaagtccggtctgtctttccattgtgtgggtcccagggccagaggaactcatgtcggcaggcttggcagcaggtgcctttacccctgagccctctggcgggtctgtgagagttgcagggtcatcttggaagctggtcctgacccaggcagtgtcctgggaggaagtaaccactgggttggagagagctgtgtaaagttctttcactttgctaccagatcttacccctagctgtgtactgcactctccctcagcaactcagctaggcacacagagctcaatcacctccctccctccctccctgcccccacctgtgtgtgtgtgtgtgtgtgtgtgtgtgtgtgtgtgtctttcttgtccctgcagagcaacatgcccattgtgaaagaaaaatatatactggatgttactatcagtgccctggaagggggtggagttgcttggaggacctggtcttggctgctgctgttctgcaaagatcaaaccccaggcatccagctgcctagcaagtgctcactcttgagtcataggatgtcatgtagcctaaggctgactaccagctctgctgctgaggatgaccctgaattctctgcttccatctcccaagtgctaggtgtgtaccacctagcccatgtaatggggtgctagggatagaacccaggtcacataacatgttagcatgttttctatccatgggccatagcctctgaaactcaaattacacaccaattaaggagatggcttgagtttagtgcagaagttgagtaacccccctagaactccccagggaaggtctgaggacatagtcaggggtggagcaccccccatcccctagtgagggtctggagacatggctcagcaaggtgcccacctagcatgtgaggcctgggttctgtctaaacacaaccaaataaacaagcaagaaactccagcaagttcaaagatagcaaaatattgctgattgtttgccagtgctgcatgataaatatttctgcagcctgctgttgtgtaaccaggccctcagagcagctgtgccgtgtggatcctggcatcttgctggtctggcttcttaaggtcctccatgaccattagcgatgttcttgggtctgaatgagtactacagctgtgcactgagcctgactttgtgaccttctgcctcttaagctgctcatgagaatggaagagtttgtctcccaccacccccaaccccacccccaacagtgtctcactaggttgctccctaaaaatggctttgcatcatcttggcttaaggtcagagagttcaaaattatccttactcttccaaagttaaagtcataagacctaaaggtctaaggcgtggctacggtaggatgtttggtcttaggcctggatgtcttatctaaataactggagacttggtctaaggtgtggctactcttaaccctcaaagtcagataatgagagatttaatctactgaatgtttggaaaattaaggaagtaagtctatttgttccttgtatcttgataaagaagtctcttgtcttttccctctttttggttggggtatatagaatgttgaagaataaacttgggtgtttagtatacactgaattgccctcctgactctattctgtacctctatctttacctgctgtctctcaaaccacactcccctctttggtacgaactgggcaaatccgatgggagccccccaaagacaggttcctacagatagctcctcaacgtggggcacaagcaaagaaaggttaatacagactgaagccccccaaagacaggttcctacagtgtatgggacatggccaccactgctgctggggttttctcagttgtagctaaaagcagtgtgtgtggaggcacagccaggaagatgtgccaataaaactttatttgtagatgctgaactgtgagttcccttttatttgaatttgtcacaaaatgttttgatttttgatgacttccaaccacttgaaagaaagtagctggcagatgatgcaaaaacaaacagctggtggccaggtttgtatagcaggccatggctccatggtgaccgtccagtgtggtgggtcagaacctcagcattcatggtctcccctaactagtgagccacatcccaggaagcttcacccctttccccttccccttccctacagggtcccatgtactccatgctggcttcaaggtccctctgtaactgaggcttctgcctccaagcactgggatgattggtgtgggccaccgtggttaagtggtgctggggatgaactcagtagttcatgtgtgctagacgagcactctgcccactaatgtcccccagcctaacgttcctgctttatgcacagctcagtggctttggatatagtcacattgtgtaactgttactgctattccaagacattttgtcactcccaaagaagccccatctcctgaacagccctctctgtccatcaccccgtgaatccatttcctgtctctgggtttccgtgttctggtcatgtcaccaagccccataccctgtggcctttggtgtctgggtcttcctctaagctaatgttcttaaggtcagagatatgatgggcatccatggctaagctaacactgcctttctttttttgcatgaaaagaaggagcctctggcagtcctcagcagtccgcattcctgggctttgtccttgctgcctaggtttccgctgtgcagacgtgcccccccctggattagagggacattgtggcaccagaaggatgcggctggttctggggcttcttaccttcaaccacctcctcctcctgccctgctgtaccctgcaggtgaggtggctccaaagttgttcttgcctgaggctatacctctacctaagaaatcaaggctacagctgccacctccatgccccccccacatgcatacttttcctttcatggcctctcagcccagtggactcgtaggcttctgcatgttccagaatgccaggtaacaggtctgatgaaaacttgtgccattcccagcagcacacacacactcggatgccatcctgtatcctaaagccaccagaaaaggttcaagagccctccctgagccatgcctcactgtgtcaggtccaccccacccactcacagtccccttgtgcctgctgcagccgcattcctcactaggaactgcacccatgctcccctgccaggctggttctgcgggcacaagtctgtgcttgttgccttgagtataccagggctagaggagcagctaggctttctgtccctcagtccctggtggggtgggtgacttgtcactcagtacactcaccaccaaagcaggggccctgctcctgtcagtgcagtctacatgcagcctgtagacactcagctcatagtgtcctgccctgccgagtggagggctctttactgcttactattctgggtggtttctgttgtagtttgccttctctttagacaaacagttggaaacagaatttcaagaaacaagtctagtgtcagctttcctctcatttcaaaattcaattgctatttttttgaaaatgcattcattctgaggcactaatctcaagtattttcttctgcctcccccataaatattccagaaacttttagaatcttccagaaacttgtagaatcctccagaaactaccagttttaatcccccaccactggcactacagtgggaaggttcactgcagcttggcccagaaaggctgcaaaccctggcctgtctttttttgggttccacattgtgcaatgcccacctccactctctgctccccattcacccctcaggctgggctatttatgggccttgcctaagcaagtgtttggcagcataagtggcctttctaaaacaggccagctgcccccctcctgcaggggacctcccagcaaggcctcttgcacttgtttggtccccaagttcattttgactatgagttttcgtgccaggttgcctcttgatcacaggcaatgccacgggtgccttcaccaaggaaaacagccaccctgcactggggacgattctcagcacttagtccacaaatggaaataaaaatctatataacataaagttaacctttaaattttttattgcctgtatttatttctctgtgtgcacacatgtgtgcagaagtcaaagggtaacttgcaggaattcgttctttcccaccatgtgggtccaggagttgaactccgaccctcaggcttagccgaaagccctttatctctggagccagcttgctggtccttttcctgttttgttctgtgacagtgtcttactatatgatcctcctgcctctcctgctttcaggtgccaaagtgacaggcatgcatcgccaccgaacttctgtctacctcctctttacatgaaactactgtgcactcaaattacttaattttcgagagacatttgaaatacaatcaggcaattaacactaaattgacaagctcgctaatgttttgtgctgtgatgattttactgtgagcgtaattacccgcattaaaacacatggacgccgttgcttccatttaagttcgtgattaattacttcaccttcattcagcaagcgcagccttagtcagctgtgccctgttgggttctgtgagacgtgcaccaccccatcatgaggcaaaatgtttgtgctgggcctcatggcacaggccttccaggcagccaatgggagtttgaggcaggaggattgacagttaaaaaccactcagtctcagtagtttggttagatgctgtcatgataaaaagtgaaaagcctgagggtgtggtcagggatgtagcccctgtctggagcccctgagtgaggggctaggggtgtggtcagggatggagccccatctagaatccctgagtgaggggctgggggcgtggggggggtagggcatacctagaatccccagtaagggactgggagcgtggttgtgggtggagcccccacctagcatactcaaaagctctttatttagcctccactaattcataaatttttttgttggtttttccagacagggtctctctatgtaaccctggctgtcctggaactcactttgtaaaccaggctggcctcgaactcagagagattctcatgccccctgccttttgagtgctggtgttaaaggcatgccccaccactcctggggcccatatacactttcttcaaaacagatttgttgcagccagcaaagtgtctcagtggttaagggtgcttgccaccaatcctgatggttcagcctcagtacccacatggtggaaaattgttcatatgtgcactgtgacatggaaacacacacatgcatacacaaagcgtaatacaaaaaaaaacaaaacaaaacaaagcaccaccagacttactgaagtataatttagaccacaaagtataaccatttgaaatatattgctcattacacttttgtatattcccaaggttatgcaatcatcacctctaaccagaatattccatgatttcctaggaaactccatgcctgtgagctgcaccttcacacttccatctatccagccccagcacctactttctgtctttagagcagccttttgtggagccccacactgtgtgtgtctgatctgtgactggtcctctcactgagtgcagtggccttggggttgctgcatgttgctgctgtgtatgttagcttcttgctattcatggctgagtaatatttcaaatgggcatggagcatgctgggtgcccattcatccttctcccagggttggctgagggtggaactatgtgttctgtctcccttgtgttcttctggctctggcatagatgggaccttgcagagcaccatacagtgcaagctgtccttcaggaaaggggttccctctaaggacacagccattccagcagtcctgctgctcggccctctgcactgagagcggctgctttgagcctgatgctgggtgagaaaatgctgaaggattctgtgtggatgattaactgtacaaatattcactggacagccaaggccttcgagggctggctgccgaccctttatcgtgatggtttgtttttaaaatggcaacgtgacccctggtaaggggagggacatgatgcagtggatgactggttccagcactggggactgaaatcagattccaatggtgtcaccaacacgacacattcactgggcacctgctctatgccgagtccacacccacaggcagactctgtgctgtggtcatgtggtcaccgtgttccatgtgctccagccacccaaactagtaaaaaagttgagaggacaggagttgagacactggccctggtcacttagctgaaatgaagatcaggagatctggagctctgcatcctctggcccctggtccagcttcctgtggccctggttttcttcattccctccctacatcttcatctcctcttgtcatttccaactgtagtaccattggccgggaggagcactctccttctgggtcctctgcttcattctcctggggacattctcacaagaagcaaaccctgggctcttccttaagttcgacctctagtccggcttgtacccaagttccagactaggtgtccatcattccatctctctatccctctagtgtctggcttatttccccacaatctccatctaatgcacatcagacctcagagtcccagggatcagagtgtggccgccgccagggtcctgtgagttctggaccagccagtgttctccacatggcagctgctgacttctaaatgtgtgtcacaagtgtcctgagatacaccgtctagtggcttcttactatacccacggggggtgggggagagaggagagagagagagagagagagagagagagagagagagagagagagagagagagagattccacggggcacatgtgtgtcctcttcatctcctcccccatctcctcctccatctcctcccccatctcctcccccatctcctccatctcctcctccatctcctgtctgccatctatttttggcacagcatgtttgtcatctgaccttccgtgaccttggtgtcacctgcctcctccctcttgagtatcacaagttcagggatggtctgctcttttcctaccaggtttcttagaacttggagcatcaaatggcgagtatctcttgagtgaatgtgtagccagtggctgagccccaggctcttccagtgcagtgtgctgtgggtggccttaggggctctgggcatgtgggatagaaagtgagagcaagatgacagactgctgggggagtcgcctgtcttgtgcgccaggtctgtccccatgtcgtcccacagtgacccctgtctcgcatgttcacccccccttcactgctgaccttgtcatgagcaattgacatcattgctggtgatgctgctgtgttggcttgttgtccatgacaacccttgtgttgacacaaagcccacacaggccattaggaggtggcaggaggacgggcagccaacagacaggccagagtgagcacgaagccaatcacacttcagttacagtgttatcattctgtgtggtgctgagaacggagcccagggcactgcatgccaggcaagtgctcaaccctgagctgtgtccccagcactgtgttgttagtattggagacggattctcttcacagccctggctgtcctggaactcactctgtagaccaagccggcctcaaactcacagagatcagcctgcctctgcctccttagagctgggattagttatgtgataccatgcctggctgtataaaaccttacatatgaaatttacatggttagtgaaagccaatgcagtgggcatggtggtgcccgcctttaattccagcactcgggaggcagaggcagcctgtgagttcaaggccagcctggtctacagagcgagtgccaggacaggctccaaagctacacagagaaaccctgtctcaaaaaaacaaaaaacaaaaaaaaaaagcattttccaattagatttcaaagaatccccatgtatctctttctgcctttccagagtactcagaacattttatccctttcccaaaattatcctgagctcctctttgggagttgacttaatacagagctaggaatggagttgccaaaaacagaacaagttagacctgagcccatcctagaggcctgcttgtcctgggggaaggcagggccagggagacgcctgtcttcagatctgcatgtaatcagtttctttaaaaatatatttatcttgatcatagtcaccccaactcctcccagattcatacccccccccaactcagtgtcgtcttttgtgctgcccatgtattcctgggtgtgggcctggccactggggcatactgggcttactggtggccacattccttaggaagctgctgctccctcccccagtggccatcaactgtccttagctcctcagtcaggggtgtggtcatgagcccctctccctcgtactgcaaggttgactgagttcctgagtgctggggtcctgtcctgtcgacaccagtttgctctggttctgcctgacctcgggctttcactgtcttctggtagtccctggaggggtgtggcgtagatgtctccctggctgagcactcctctgtcttgttctctgcactttggccagctgtgcatttctgtgttgaccactgtctactgcacagagacacttctccgatgaggtgagcactgtactcatctctgggctcacatccaaaaagaggagactatttcattgtggtgcaggtcgatgatagaagtaggcttgctcatggggcctgtaggcacccagccaggagtctggccaggtttatcaggcacatcaggcacgagtttatcaggtacgagttggtaaactttaaggccttaaagcaaatcagagagcagttggtcgaccttgtaaccctgtgccactactgcacccatggttggtgtaaggactcaggcatcatgctggccctcccctgtcacttggtagaatgcactcagacagcaccctggtcagcccagggttccatggttgcgtagtctccacgtaggtgcaaaggatccctttaaaagaaaccccgcccacttaactctgtctttcttagtcagctctttcccgctctttctcactgttcccctggagcagtctccctcttttcttctgtcctctctctgtctctctttacttttctctttcgttcccccctgcttccctttctaataaaacttctcacttaagctctgcctgcctggcatgtttgtcccctgccttggtcacccctgcctgccacggaatgtgacaaggttcccacgcgctttttcgtgacaggtggtctacatcttactgactgccagtgttatcactgctccgtgtgccccactgtcctcttctgtctccttccatcaggttgtcagccctggggagctgcttacagtgcaagtcacaccccatcacccctactgtcaccctcagcaaaaggcacaacccctgtctgagttgacctgtggtgacattctggtccagttggctctgcttagtagccacaatcctgccccaggccctttgctgtgatggaccgtccaccaggaacacccttcccctcagctggatggctccaccctagccctgctgtccaggaaggcagcaggcctttgagaactgaatcctagcaagcccagcccactacatccaagccagatgccttcccctctgccacttaaactgcctgacagacactttatagtcgtctacctcaatgtccgcacccctcaggcactgcactgcaccacaccacacacagatgagatggtcctttcagagaggttcttgtgtggatcacaaggtcatgcagacattcaggctgcatttattatttttgttgctttaattattcatgtatgcatgtacatggatgtcacagttcctgtgtggtggtcagaggacaacttggaggagttggttctcttcttccaccatgtgtgtccttccagtcaaactcaggtcctggggggggggggcagcaagcaccttcaccctctgagccacctcgttgcccccagctcctgcttttggttgatgcctgagaacaatacatctgcattggtcctcctgtgggatgagaagtttagggaccttaccactgcacctgcaaagcctccttcccaacacagagcagcagctgtgtccccagagccgcaggggcaccattgccacccagtgcctgctgcgcatgtcactgagcagctcagcccaggtctttggagggacaaccattccttcacagatattcatctcccaggtggtagcttaaaattacaacatttctgcacagtgaccctgtctgcaccaggagccacggggacacttaattgacccatgtgtgtgcttgagttagtgttggcccaagaggctggggtctcatgcttgctgtctgactgaaatggtttcaggggctgcagagatggctcatgggtaaagacctaaaagacccaagttggatcccaaagacccattagtggaaggagagcacagactcgcacaagttctttgagctgcatgtgcagagtggatgcgtcaacagggaaaaaacaggagatggcttcagagccttggtcctgtccctgaggacaagttcactgggcttagtgtgtgcatgggacacgaggcagcgctgtccctcacaagggccttcaaggccatgcccttgagcctcctgcccagtggggcctctgaagtcacccaactcctcctagcaacattgcctttctctgggagggtagacggtggagtgacagtccccaccggtggtggcgtccctcccctggggcggggccaccttgagcaggggtgctgagtggcgtcccctggggcggggccatattgagcaggggtgctgagtggcgtcccctggggcggggccaccttgagcaggggtgctgagtggtgtcccctggggcggggccatcttgagcaggggtgctgagtggcgtcccctggggcggggccaccttgagcaggggtgctgagtggctcctcccacgcttgtggttcgcgaggaattcttgttgggcagctgctccgatcttacacttttctcaactagcttaacccttggttctttgcccagagaacagttgtgtgtgatttgctgtctgagggtaaacccaccccatctttctccccagcccagtgctaggaagggtggcagcccgtctgtcccaggattccttggagctgccttggtcgggttcctgggcttctggtcttagaacagatctggtgagctgtcggcctttcccagttactatagagaagaaattatttgtcttgctgttcaggctctgaaaataatagattacatatttggaagggctttcttttttatttatttatttttttattttagatctggttaacgtgagatagagaagttgccccggggatgacattgtttggtttgggaagtattctcttggttgccgggcaacgggcgcttggaaacgggagtggactgcgtcgcccctggcaactgttgttactcagcaaacaatgagggctgggcacgcggcgccagaagcctgcccggttcccatccagcatctgcatgtgtttttttctgattagatgatgggggtttgggaagcggcaggtagcaggcatctgatgtccctgggcgcactcgagttgttgctctgcccgctgactctgatttaagtttttggtagaattttaaagaaaacctaattcccggtgtttctagagccactatcagggccaccctggtggcagacaaggtgaatcccactcaggactgcttggtgttggaattcgaacccagagctcctggtcccggtgctgacatcccgcctaatcctgggaggccagggtgaccccacaggacatgctgagatgctgggggcagcctcgctaacaggtgctcctcaaaggccactttccagccctagctggatcaggatcagacccgtgaccctcccactcttcgctgtggctggagatggggactatttaccctggctggttgctgaggtaaacattcgccctcatccgagcagaggctctgctgggctggcagatacatctgcctccctcctccagccaccctgccccccttgtgaggggagggctataaatcgatactgcagagcaggggtggttcgtggggaattcacctgggttacaggtgcttccacagtgtccctgcctgcaactaactcccccctacaactcccctttcaaaagatacccgtttgatggatgaatgggggccgtccccaaccttttatgcaagtgactcagctcctgtgttgggacatttaaaagcgttacaagtttctcaactttcagggttgctctcaccactgaatgtgacaatgccctattaaaaaaaaaggaagcaagctccttggatgaaaaacagaagggcaagccagcaattccacgtcatatgtcatataccatggttaagatctagtgggatgggcacggtggcacttaccagtcaccccagcacttgggaggtggagtgaagacagagcatttggagttcacacccagcctcgcttacctcatgggtttagaaccagccttggcattgtaagactctgtcttaaacaggaacagccaaacaaaacatcatcatcattattattgattttttttttacattttttatttatagtgactgtatgtgtatgtgtatatacctggacatgccacagctcacttgtgcgggccagggggccacttttgacagttggttccctccttccaccatgaaggtcccagggatcaaactcaggtcgtcaggtttgggggcaaatgctgagccttctactgagcctaactgatttttgtttttgaatttcctgtgaaaatgcatgctccttacgagtcaagctttgccacttggggtagatactgggttgcaaagtgtatccgagtgtcagtgtgatttaaggacctttcaatcagagcacctccaggtgggagtccctgcatgggcctcagtagttgctctactttaatgcgagtgtggggaggcagggtacgcctggggtggagggagcccagagagccagtcccccatcactggcacagtcacatgatcagagagggccccagtgagctggaagtgccacttgggccagccaagacctcgtcactgggtaggcatgaccctccccactgtcaccagtgtcataccccaaagatgctgagttaagaacacgcatgagctctggtcaccacccacaggcagaagggaccgcgatggtgcctcctgcttcaccttctccttggctctgcaccagcagagtgcagtgttcaagagtaagggacaatgggaccagggcagaagcatgagggatgggaaccaggtgagcaggagtggtgatgccaggtggcagcaggcggttagctggccctaggaaggcaaggccaggttttagggctcatgactacaagctgtggagtggcctggttgggctgagcaagctgagctctggggccccatctttgccttgaaggagggacagtgcaatgggaagggacataggagaacagtgaggagtgaccatgcttggcctatggctgtcagcaggcacttctgtccccggggacccatgaaggtcatggtgggagcagagggctgcttgcactcatccaagcatggcgttccacgcctcacaagcccgtgttgctctgagaaaacctctcctaggtgccaggatggggtgccctggccagctgggcccctgtaaccattcattcagctaactcatggttcctgtaacatgggctgacttagagagcttccctttttgttttgtttgtttaagataaaacaaattctgttctctgtgtgtgtttgtgtgagtgtctatgcatcatgcatgcctgttgcccatggaggtcagaaggaggcactggatcccctggaaccggtgttacagatggttgtgagccaccatgtgggtgctgagaactgagccgggtcctctgcaaaagtagccagtgtttttgagccagggtctgactctgccaccctggctagcctgagactcattatgtagccccagatggccttaaactcacaatccttgcaggaataatcctgtctcagccttccaggtgttgagatgacagataggaaccaccacatcccaaatttgggcttttgttcttcccaaggtgacctggggaagcctgtagcccaggctagccctgaatggaggccctctttgtctcatctcttgagtcctaggatgactggtgcacctctagaaactcaaaggctccctgttttctttcaggacagggtggcagcaggaaccagagctggctccaccagtcctgcctcgtgtccctcaggtgcttgcagtggcagcaacaggttatcacttctgcatataaggctttgctcagtctggccccatcctgctcaccatggccactggctatccccaccccacccccactttcaccttggctcttgacctctgaccctcccacagacagggtccagttgcagctctccacccccacccccacccaggcttggggcagattccttaggctactgcattccatgtctctcagaggccatcatctggtaatgtgcgttttgttgagagggtttctcactatgtagcccatgcgggttttaaatggcagtcctcctgcctcagcttccccagtgctggtatgacaggtgtacaccaccacacctggcacttaggactgccatgtctagtcctgggcaggcctgtccttcaccactcctggctggctctccatctcctgagttcccatagataaagggagctggcaggttaagaggggaaaagggcatggtcatcccacagagatggaggtagagacttaaggacaggatggagtgaaggcaacaggactgagtcaccagccagcatgggagaagagtcccctttgggtggtggcactgagggcagaggtctggcaggtagccagcccagccattggtaccctgagtaatgtgtgcagtgaaagtcaggcttatccagctaacctacccagtgtccagctcaacagagagatgtctgcagggtcgaaatggccatgttctgggagtgactcagccatgggaggtggggagcttgcgttgagcatgtctgtgtgacactcctaccccagccccgtcaccaacatggtgggctcagggcaccctgacccaggggtgagtttacattccccaggttgacacaaaaacatggctctccactcagacagggtaagagtttattttgaagccaaatttgagtgaccgtggaccaagaacactcaaggtccatgttcgagtgtgggagccatttgagaacgttttgtagtggcagagcaaagagaaccgcagctgaggatgttccacatagactgatggaggcctgaggggcagccacggcacagtggggaggtggggctgtgggcccctgatgcgcttaatgactcagcctttgggttggtggggattgggttctgttattgatacagcccagaagttttctagtctagatgttgggtctgatacagagaggcaagaaatggctacttaggaggctaagactagcccaagataaactgtaattagaccagtaccaaccttcacaatcattgcaatttgaatgtcactcagcctctgcaggcacagtccttcccaaggctcctccctcacgtcagaaacatacacacatgcatgcatgcatgcatgcatacatacatacatacatacatacatacatacatacatacatacatacactcatatacatacatacgtgtgtgtgtgtgtgtgtgtgtgtgtgtgtgtatagctgggttttttgagacagggttttctgtgtagccctgattgtcctggaactcactttgtagaccagactggcctggaactcacagagtttgcctgcctctgccacccaagtgctgggatcaaaggtgtgtgccaccactgcctggcttgtttgttgttatgtgtgtgccacagcatacatgccaaaggccagcctgcagctgtcagtgaaccgtgaagattggacttgggttgtcaggtttggtggcaagtgccttgactcactgagccctctcatacatagactggaaaaagaacggactctgaaggttcacagggagaaatagttgccacttccaactggaaaccccgctggtgtcaaggacaaaacagctgtggctcagtggtcagctccatccccaacacctcataagccgggtatggagatggaagtcacacacctagcatcacagtcctgaaggagtggaggctggagggatcaggagttcagggtcagcctcagcactcagtgagttcaaggctcctggagaccaagtctcaaaatctagaaataaaaacaggagtggagtcagacaccccaaaagctcaacagaagggaagatcatgggatgcctgagacggtcattggccagggtgctccagttctcagacctgtctcctctccctccctccctcagtgtgtgggtctccatgtgggtttggcctttggcttcagagggtaatgactaggaaatactgagtctttttggcctccctgggtggccctgaccctggaagtcccacctgggatggttctgtccctgacggaccctagcctttcttggggacacctgtgactatcacacaatgtgagcctggtgtgagcactgctccgcacatccattcagggatgtgggggacagaattcaggaaagagtctaggctcacagtgaagaaggagacacactttctcacaaaaagggaccaggtgtagccaccaaggccacctccccaaatgccagcgtcccttcagcccaggctgagcagggcagcctcctcctccccccacccaacggttgccattgcccagtctcacacctgggccacctgctcctgagacgtcaggccataaggaaccaggggacttgacatcaggaacacttctgtctgtgttcagcaaacctgtgtgggaactgaagtctgggcccatctagctggatctgtcccctgttgctcagagtaggggtgcaagttgcattcttggtaggtaggacctcaggtgtcatccatccagatgccaccaagacatatactaagaccaaccgaggcctgcctcccccaaagcaaaacttaaccaccaggctccatccctgtgactccaggtgacaagatgtgacagggccacagcttccctggtcaggtggacagaggggtagggatagaagagagaaagagagagaggggggagggatagagagagagggagggagagaggagatttcttaaggtcacagtgagtcagggcagccaggaacccagcccagaaatggcttgcagcctcccgcccttccttgcctgcccactggttgctaggcaaccggagagttttcctgtaaacaaagggcgcttccccagcagatccacctggctccagtccagccccagcccgctcactgcagcctgtgactgccccttggagtctcctggagacagcaggcgactactggccacctcgatctgcagtccagacacttcacttggttactctgtcaagttcaagttcaaatgaactggatggatgcaggactggtcttgggtcacttcagacttctctcttcgaccattgaccagtgtgtggcagagctgggccatcagggaaccataatctaggc

SEQ ID NO: 5 - DNA, 34173 bp, Cricetulus griseus
  >scaffold_1 dna:scaffold scaffold:CHOK1GS_HDv1:scaffold_1:97016870:97051042:1
  misc_feature 32763..32862: /note="n is unknown"
ggtaggggtacacgcctctaatcccagcagtttggaggctcaggcaggtgggtctgaacctgaggccactctgggttatatagtgagacactggctcaaaacaaacgcacacacacacacaaatccaggaaatggagagtaaagtttttcaagagaggaggctgagtccttgcatcccagccactaaaactgggatgtagagaatgcggccaggagacgtctgatatccgcttaacaaaaactgggacgaactgaggtcaccaacagcacccccccacccctccgccgcagaaaaagcgattggatagtttcctttaggaaacccaatcggctcccctggtgaccgtggtcttctaagccggaagggaaacataagctaacaccgcccctaagaatgtcattggcaagagacttggcaagctccgccccacggaaacccgtcgtgggggagaaattccgagaggaaataactggaagggagcgagcctcccccggagctctggggcgcctcactctcggcagaagcgtctagactctgagcacttacgtttagaactttccgctccgacatgttcgcctcctgccggtcgcacaagcgaagaagctgctcgctctggtcctctcggagtttatccgaaccggcgctgccgctctctggacgtcacttcctcggccgtcttcctggctgtagcattccctttggctggtatctctgtcgatcaaggtcgcgtgtgctctttgggttccttcctgagtgcccgtaggtgaggcagtaaataaaggttccgggagcctctggatcgcttgtgtgagtgtgcgccgagaaagctgcagggagtccatcagattttgttccgcactgctgctctattgatgttgtttgtttttgagtcagggtctcactgggtagccctggctgtccgggaactcaccatgtagcccaggttggttacgaactcacagagatcctcctgtctctgccttccgagtgctgggattagagatgtggccaccttgccccgctctgttgtttcttcgttccttcatttctggtgctggggattgaacacagggtctttgcacatgccaggcagacccgctacccctgagccactacccagccctctaaccttttgacagcctctctgtaaaacgcccagagaggaggagctctctgtagcccaggttggccttaaacttgcagcaatcattctgcaagtctcttgagtagctggaaatcagtgacctgcctggttttcattacgttttgttgttggtttgtgttttttcttttttgtgagacaggaactcactgcgtagtccaggctgtccttgaaatctcagagatccgcctgcctctgcctcttgagttctgggattaaggcgtgtgtcaccgtgccaggcttagactggtttttacatttgcttatttattgtttgcacatacaaactttggcaagtccccgcccccagcccctcacctggggatcctagggaggacctccacccccgagtcagccccctaccctcctcctctgcttattctttttgaaacagggtctcccaggctggcctttaacttcccactattcttttcctctgtcctcatttcgacaaaggctgggctgcatcctgtttggctctcacttggggaagcaggtgctattatggttgttgtgtgtgtcccaacattcatctattggtaaccccgccccccccaccttttcttttgcagggcctgtgatgggaatccgggccttacacacagcttgctttatcccctcccttcctcccaaccttgtgttgcctgatccttccacccttaggcatcgtaccacgtggaattccttttggaagctaacactgtgctgggtcatcccagctcctgaacattgagccacatcaacttcttttcctcataaaggccttgtttgggggtcgtgggcactcgagcacagacaacccaccacgttgctcactcatgggacaagatgaacgagaggctggagtgctggctcagtgctccagacagagcacaggccacaccagcttcagggctctggcgccctcttctggctgctgtgggcactgaaacacccactccccctgctcacacacatacttgaaaatgaaattaaaatatttaaagtttaaaaatagacacttttaattattgtcgggcggtggtggcatatgtctttagtcccagccctcgggaggctgagacaggaggatgtctgtgagtttgagaccaacctggtgtagcacagccaggctaaacaaagaagtcctgtctcgaatgccccccctcccataatgatgataattttgttttgtttggttttgggttttcgagacagggtttctctgtgtagccctggcactcgctcttgtagaccagactggcctcgaactcacagagatcctcctgcctttgcctcccaagtgctgagattaaaggcgtgctccaccactgtcggactaagaattcttatttgttaaaaatttctaatcgaatcatatttacagttcacaaagcccggcacctatggaaggagaaatactatccccacaggtttggaaattgtccagagaggtgaagtcaattatctaaggctgcacacgaaggtctgctatcaaggacctagtccctcttcagggcttctggggcgtcctctctgcttgcccagggaggctccagtcacttggtttcccatagtcggtgaggtcctgggctgacacctggatgcagtacttggcgtggggcttcgtggttctgagggtgaaggtcgtggcttcaatgggtcccacctgtgggaagagagaaggcggtgggtaggagcccgcctgctgggtaaggcgcttgcatgcaggtaagccagctgcagagtgtgatctcagcgctcccacagaggcgggaggtggagactggggatcccgtctcagtctctcccagccccctctcacctggcggaagtgagaggctccatggcgccggtagcggacgcggtacttgagagagaagatgtccgggaagggccaggaggcagggggatgccagagcacctgcagctgctgcccggctgctcgcaggcgcacgctttccggggggtcgggcttgactgcggggagcaggggcggggtcaggaccggctccgctcgctggttcatcatcaggcactggttctctccttcattcaatcatacattcgctctcgcctattcatgcatttgcggtcttttactcacccattcataccatcagtccattgcttcacttgctcgttcaatcctggactaattccttaatttgcttagtcacctgctcactcacatttatgtatcttttggttcacgtgcaggtgtagtcattggattcattaacgcggtcactgtcattcactcattgaacccattagtttcttcacttgttcatttgtacacttattcattgttttactgcaccattaagtcattcaggtatacatttcctccctctttaggctcttcactcattcactgtatcgttcattcattaagtcattcatgagttcattatgtacttatgccattcattcattcattcattcattcattcattcgttcgttcacccatctgcccaaggaacaagcatttgttgcatcgcgatcatcatgactgacagaagtcgtgacaaagagaaggtttcagagtgcaagtcctgagtgggctgaagggcttttctgagacaccattttatagcaccagcctgctggaggacatgggtgcatcgtcagagagtgttactatttctctgcctgcctctagaatgctgcttcatgcccaaacaatctctatacctatgagccatctccctacccgtcccggccctcagcacccacagatctccttctgtctgtggatcccctgtcctggagccctcgctgtgtggttggtgtctgggctgctcactgagcagtgtccccaaggtccctccacactgtagttggcagcagagcctcattgttcagggctgagtggtgttctgctgtgtagatagacagtgtgtccatccatccatggaaggacaggtggcatgggctgtccctttctgggtgctgtgaataaggttgccaaggacttgcagggatgaacatttttatttctgttgagcagttacctgggagtggagttgtcagatcctgtggagactctttgtttaaccctttgagggcagtgtagcctttcactggctttcacctctctctctctctctctctctctctctctctctctctctctctctctctctccttctctcccccccttctgctagtgacagagtcttggggctcttgaacctgacttacctcgaacttgctctgtagaccaggctggccttgaactcccagagatctgcctgcctctgggattaaagctctgtacaccaccctcagcttttgtcctcccttaactgccacatgtcacatgtttaataatatagtttgcgcgtgggggagggaggtcaccgaggagctgacgcccgagaagtgacctatgaaggctaaggaaccaagtcatgcaaacgctgtgggcaggatggagtctggggtattggggagtccagtgaggctggaatagaggacgagggactctgcggggacccggcaggacagacactcactgatccgctcagccacaaaggccaggaggctgctgctggcgccgccgggatgcaccgcagtgacgtttaacacgtagggcactgtggagaacaggtgtacgtccgggacggtgcactgtgtggcctgcggggtcggcagtaggcagggcaggctctgctgctgggcggccataccgagcctgtgggaagcaccgtgggggatcgcaaagggcatctgggtgtccgaggggcccagcccactcacaacagaccatgggacccggacacgcccagggaaacactgggggtgtgcattctgaagaactccctagattacccacaccccacactcgttctgttgttctggacacaggctcccatgggtcccagcgtccagaacaacagaaggagcggtacactggaatctgttggttccctgtgtcgtccaggcccctctctagtctctgacctgtaagtggcgatgaaggacatggctctggtggagttgggagcccgcaatggcgtccaggagcagtccacggccacagggtaccgagaggcacggcatcgtaccctgggctggctcagagcagctagggctggagagacaggggcgtgagcttccaggagccttgcaggtctctgttatgcatgcaagcctgagttcccaagactgctacaaacccccagggcctcaactgagcccatttttctagatgagaaaagtgagctttttcacccccaccttccatcttttctttttttctttttaggcgggtctcatgtagcctaggctggccttgaacttactatataactgcagatgaccttgaactcctaagcttcctgcctcagcctcctgaatgccacatgacaggcatgtatcatcaacacccagcatctcctagagtttctgacccacagctgagtcacaaaggtgaaacttcgcagttgctgagagtcaactgtgtatctccacaaacctctaagctcaagggtaccctgcctggataaatgaggctttgcctctctgtgcctcagtttccccatccttatagcggaatgggaatgggtcacaccagtgtaggtgtgagttcccacctgagatatgacctgagtctgaaagtgaagggctggtcctgttggcccaggcaccccagtccccagcgtgcccacctacctgtccctgtattgccaggggagcagctagcccagagagcgagtgacaggaggagccgctggcacatgtctgttgagttgagggacttgctggagaaggggcaaagggctagggaccttcacagggagccaggtcctgggtgaggacctgcccagtgcagctcagtagctcagtgtgtggggcaggagacgactctcaccaactgcctgtgtatgagtgtcaaaggccttgaggtgggggcagggggagggcctcaaaagggagaagtcactgagtgaccttacttccggctgatggggaagccccaggaaggtggatgaggccaagggcagatatgccgggggaggaggggagttagagagagagacagagaaacagagactgagagatagggagagagagacagaaagacacaggggacactgtcccagagtctggtcccagtgcagggtggtggccctgtcaccacccacatctccccaaaactgtgtcaggcccccagacaacagggagcaattgccaccccccagatagtccccagccccagggacactctcaggacagctgttcagaacacccaaggaaaccaccaggacaggctggagtccctgggaactccaggccacacccctcccttcaggaccaagagagccttgagccttctggggactggggggatttgcccagaaatggggagagacaggagctggggccctgccaggaagtgatgaagaaaaatgtaaattcaggcatgactattgccacccatcatcccagcacatgggaggctgaaacagggggctttctatgactttaactccagtctgaggtacacagggaaacctccacctcaaaatgaaaaaaaaaaaaaaagaaaagcataaaagattagggcataggaccctgaattcaattcacacacacacacacacacacacacacacacacacacacacacacacacacacaccaaaacaaaacaaaaagcatgcccagatggacaaaatattgaaatgatgaagaacaagagaatccagcctagacttatttattcactttttaaaaaacactggtgggaacagagccagggcctcaaagacaccctgacagtttccagccgctcactgggattttcgaggcaggggctttccccctgagtcacaactcaatcccctggtttctttaagtattgcattgcactcttgtttattgccataactgagctttgggtccagaagctcacactgtcttctgagccctaccactgccctctcacagtgttccacactggttgttttcctctcactgtgatcttgtactcctggttggatggttgtgacattgtcagcctttgaagagtaatgggaatcagaggcccagagtgtagggagccatggtgcgatggggtcaactgggcatcactgttaatgcactggctggctttgtgtcgacttgacacaagctagagtcatcagagaggaaggagcctcagttgaggaaataactacatgagatccagctgtaagtcattttctccattagtgatcaataggggaaggttcatgataggtagtgtcatccctcggctggtggtcttgagttctataagaaagcaggctgagcaagcaatgaggagtaatccagtaagcagcaccatccatgccctccgaatcagctcctgcctccaggattctgccctgcttgagatcctgtcctgacttcctccaaaggtggactaagatctggaagtgtaagccaaacaaccccttttctccccaaattgctttttggtcatggcgttttgttccagcaatagaaaccctaactaagacaagtttgtaccaggactgtggcatattgctgtgccaaacctgaccctgttttggagaggattgtggaaggactttggaacttaaaaagttctgtggaatgttctgtgagagcttgggagataagagtgttgagagtggatcagagacatggctcagaggttaagagcactggctgctcttccagaggtcctgagttcagttcccagcaaccacatggtggttcatcaccatctataatgagatctggtgtcctcttctggtgtgcaggcatacatgcaggcagaacactgtatacacgataaatatatcttaaaaaatgttgagagcagtccagaggatggaagcttggcttatgaagtttcagagggaatattaaagactctattggggccatttgttattttgggtgaagattctgtggttctggttagctggggctgaagaatcagctgtgattaactaggtaccagaactactaaagtgaaaactttgctttgttgggatacttgatgctggtcagctggagctgagaaattagacatgattaagaagacaccagcatcagtgagatgaaatcatctagggaaagcttcctgagagcactggaaagctgtgttccagaggaggccaagattgtacctcatgctggcagcgggaattggtaatatgtaagagtcacccaggtggtgcttgttttgaagccatgaaggggtcatggagagcagctggggcttggtattgggagaggccaggaaaggccactggtgaagatgctgcctgcctcaaaaacagctgaaggcccaggactgaaggggtatttgagggttggcaccatgggagagcctatgagaggctattggtgaaagtgcagcctagctgtggcagaagaccagcattttggagatgccagtaccatgggatgaccaccaagaatgttaacagcagaggagtagagccagctggatcctaaaaggcaggctgtgtgtgctgtagagctggagaaatgacccaagcccttggaggaatccagaagatcatgagtggatcccagatattggatggttggaatttggttttgctttgatttgattgtgaccctgattttccctcctgaagtaagaaaatattttactggagcccacagttgagagactctgaattttcaaagactttggatttttcaaagagattggctaatttaaagggactgaaatttaatgtgtttaaatttataaagactgtggaacttttaaagttatttgtgtttttaatatgggattttggggattaataagaaaggaagggttgtggattaatcttgatgtgtttgtgtgtcaagtggacaaggagtcagttgcgctggctggctttgcgtgtcaacttgacataagctagagtagtcatcagagaagaaggagcctcaggtgaggaaacacttccatgagatccagctgtaaggcatttctcaattagtgatcactgggggagggtccagctctccctgggctggtgccatccctgggcttgtggttcagggttctataagaaagcaggttgaagccccgtgttggtgcctttaatcccagtacttgggaggcagaggcaggctgatctctgtgagtttgaggcaagcctggtctacagagcgagtgccaggacaggctccaaaacaaaacaatacagagaaaccatgtcttgaaaaacaaaaacaaaaaaaaaaaaaagaaaagaaaaaaagaaagacggttgaacaaaccacggggagtaagcagcaccctccgtgatttctgcgtcagctcctgcctccaggttcctgccctgtgtgagttcctgtcctgacttcctccaacgatagagtatgatctggaagtataaaccaaataaacccttttctccccagattgctttttggtcatggtgttttgttgcagcaatagaaaccctaactacaacagtaaggtcccaagctgagccgccagtgcatggtgagtcctgttcattaccctggagcccggggaaggtggcccctgaggcttcagcttgcagaagtgaagatggagagtggacagctgagctgtgtcctcagccaccctgagcctgcaagtgcttcatctgcaggatctggccgacaatgcaccatgtccttgtcccctgcagtgagttggtaggggctgcaggcagagttgagagaaccagagaagagagagcaatgagggagaaagagagggagctatccacagtcataattaataagtctccacgtcatgatttgggagttggttggtggcccgaaagaaagtctgctacacctctgtggcccccacatccagccattctgtagtcatcattagcacgtgactccacctgctgttttccaagttcaggcagaaacgaggagccctgggaaactacattacctgaggcagactgagcatgccagtcaagtgtgagtgtggctttcaagaatgctcggtgggcctggcggtggtggcccacacctttaatcccagcactcaggaggcagaggcagggagatctctgagttcaaaaccagcctggtctacggagtgagttccaaggcagccaggactgttacacaaggactaaactaagaaatcctgtcttcagaaaccaaaacaaccaaccaaccaaccaagaaacttcagtggaaggcctgtctgcaagcagcacacaagataaactccaccttctgttttccaagttccagaactccacaaaagcaattttccattttcatgtgtgtttttttattttggttggaggtgggccttttgagagttgatccaatctaaggccttttctgaggctctgataaaagcacccaagggaacactaattctgtgtgttggcctaagggcagacttgagccactgtcttgaaggaattaaagggaccagactccttagcctgaggggctgtggttatcagtcccaaggccaccatgtgctcagcctgaggtcacatgtgttcttcttgccagcattgttgaattagatttctgctggctctgtctgactccccccacaaaaagtgtatcagagttgtatttaataaacttgcttagcatgagacatcagcttatgcaatatctactacataactttctatctttatccttctcatcccaggtcgttacccttgacacctcccctttggggccgctaatttctggtgtttcatatcatagaccaaactggtttaacctttccatgtcccgtctccatctcccaagctctggtatgatcggccaggggaaccacagaaagctgggagagcgttagtgttttggatagcagtgtgtagctgagagaggtgtgagcaatactggttgtgccttattgaaattgctggtgcctggtgaatatcagtcaggaggtttatatttgacctggatggactggacgctctttcagttgtggggcagggggatcactctactgaacattgtttaatgatcttcatatgctagaggccctgtgcacagaacggaaatcgcctactgagtattggaaaggttcagggatgactttgcagtccagacgcgagttctgctgcagtgccaatctcggcatgtcgggacagtagggaactacagagccgcagctcttcactgctgtgactcaggcaggcatcactagccaatcatggcctccaaatggactgtcagtcagaatggggtccggtacttttggtgcttcatgctgcaggctccggcggctccggggctgagggagactctagtgctccgtgtgctgccaggagccgtgaggacagcggggcgagctgggaatccgccagggtgagccaggggccgccgcctccacgaggggaggaggcggggaggcggggtggtgtcctcccggggccacccaacacagcgaggtcccgtgagggccacgccgtttccggcagctgggcgcgaaccaggggaccccctaagtacgtggctccggggtgcgcctgcgcagagcaggggaggcgtgaactcctgtgtggaagcatcgttgttgcccagggaaggcacatttgctgactcgcagagccctggtcactctagggtcttctagaagttccgcacctgtcactgaacattcaggtgtagatctgtctgcagttaattctgtgcagggcataaagtctgtgtcatttacatatttgcatatagatgcccagtgggccagtagggcccacccctggatttcctggccccatgtgtcacaattgactctatattaattgttttttcatttctaagtttgctctcgtgttctgttgatctgcgtcgtttcccagacagtacagtctttactgcagttgtgtgcaaagttttgaagtcaaatggtgtctctgtgtgtgctatacactcaatcttgtgtggatggcctttgtcatcatttttctgtcgttgttgttaggaaaaattgttagactttttattggactgaatccataggccagattctgtactgttgagtgctattgaggcttcctgtctacaatcctggaatttttctcctttttttagttccttgattcttttttttaaaataattttaaaaaaatattttatttatttattatgtatacaacattttgcttccatgtatatctacacaccagaagagggcaccagatctcattacagatggttgtgagccaccatgtggttgctgggaattgaactctggtgctcttaacctctgagccatctctccagccctgttccttgattcttgtaattaaaaatttatagttttggctacagatacttttcacatttctatgtatttctggctatttttttccatagtgacatataagagatatgtgggtttggatcttatttttcaagacatggtttctctgggtagccttggaactttctctgtagaccaggctggcctggaactcagggattcgcctgcccctgcctctgcctctgagattaaaggtgtgtgccactgcacctggcaaattagctgtttacttattttattctatgtgtgtgtgactgttttgcttgcatgtgtgtatgttcatcatgtgtgttttgtgcccacagaggacagaagggggcatcagatcccctgcaacagcatctatggatgattgcgtgccaccatgttagtgttgggaaccaaacgcaggacttctgcaagagtaacaagtggtagttactgctgagtcatctctccagtcctaaccttgacacattttcaaaactttctgtgtgtgtttgcacaagtacatgctgaaagccagtgttttagagtggaggtttgctgaatgatctgcctttggagtttgggaggtgactcagaaggtgtgctgatcagatttggtcagcttaacacaagctagatttagactggcctgttgccaaatctatagggaataaacatctgctctttccaggctgtgtttcctggcagcatttcccttgcccagcccaggggtagtgtttttactttttattttttttttaagagaagggtgggctttagagatcactggttgaaaagagatgcaaactatgaaagagaaagtagtggaacttctcttttccttttggttcagcccaggagaagttttctccttccctggaactacttagagcaggcacaaaaatggtgggaatgctcacccggggggaactattttccccaccctgtgtgcatttttcttagatggctgtgaggttcagttcaggtctagcctagaggcctggcaccttctccctcttcacagggaccaacactgaatgtgagcaggagtcaagcaacactacaaggaagtgcttgtgctcctagactgggtcaagtggagggtagtttttttttcatctttgggtgacttggtagagtcaggaggggagcacaggacctgcgtggaggagggtttcacagcagagaaagccactgatcaatatagggaaacaaaactgataggtacacataggaagacatgtaaatacacatacacagagagacagacatacaataaaaacaaccaggatagccatcacatatatattcatacacctgaagagacagtgacatatacatggttcccagacagtggatcatctgacctctgctgtgtccaaacagaagacacctcaacaagacttaacttctgaaagtgacataacaggtgactttctaatttgtttccttttgggttggatacgtcagaccatcaattaaagggaaccctggtggggttggaataggaatggtccccacagacccatgtatttcaatggttggcctgtggggaatggcactgttaggaggtgtggtcttgttggaggaagtgtgtcctgtggaggtgggctttggggtctcaggtgctcaagctaggtctagtgagcctcagtgtccttctgctgcctgctgaccaagatgtagacctctcggctccttctctagctctgcgtttgcctgcgtgctgccatgcttcctcccatgatgataatggagtaaaccattatcactagatgttagagttaagtgttttcctttataataattgctgtggtcataatacgtcttcccagcaatatgccgtaactgatagagacgtttgtagcagggattgggctattgctgtgattggcctgaccaggtttccatttggaggactgtagactttgggactttgagttaggaaagcaatggaatgctctaagagctgcttaatgggccatcgtggtgagagcatggaagacagtggtgctcaggtgtaacttgaacagtgggggcctagttcaagtggtttcagaggagaaaaataaaagtatattgcctagaaactgttcttgttatattttggtgaagaatgtggctgaagtgaggagttttggattaactcctttgacagaggaaatctcaaaacagcctagtattgcctctgttgtgtgattattagtctctgcctcctgaggtttggggttagcactgtgcaccaccacatccgtattgtctatctttttatgaagttcataatttcaataaaattttgctggtgtatactaaatagtgttactctgtttgcatgtctctctgtatatattactaggcgttcctcctgacatgccatattctatttggtgggcacaggaatggaaggtgtcatcctctttttctgttttcttttaaaatgagttggtgactgcatttgatatttactgacccatgtcacagaatgtattgagcacacagaattttgtaaatataatctcaatgtacatttgcatttcagtctcaccatttcaattatgaacatctatgggatactttagggcgaggtgacctatgaggatgtgcatgtgaacttcactcatgaagaatgggctttgctggatccttcccagaagaatctctataaagatgtgatgttggaaacctgctggagcctcacttccataggtgagaatgtgagcttcctgtcaccttttaacttaaggggacacacttttcatggacattggtgttcttttgtgatcttgaatatggaaggggaagaatctggtggacaaatcaggcatggtactaagatccatgaaagacagtaatttcttttctttttttttaattaattatgtatacaacattctgcttccatgtatatctgcacaccagaagaaggcaccagatctcataagggatggttgtgagccttgaactcaggacctttggaagagcagtcagtgctcttaacctctgagctatcgctctggcccccccccctttttttttttttggtttttcgagacagtgtttctctgtgtagctttagagcctatcctggcactcactctggagaccaggctggcctggaattcacagagatccgcctgcctctgcttctgccccctgagtgctggcattaaatgcgtgtgccatttaaagtctggctgaaagacagtaatttcaactgtgtctaatttccaataatatatcacacacattttctggtactgtgttgtaggctacaaatggggaggccacaatattgaagaacattgccagaggtccagaagaaatggaaggtaattttctttctttctttctttctttctttctttctttctttctttctttctttctttttctttctctttctttgttcctccctctctttctttctttctttctttctttctttctttctttctttcttttcttttctttctttttcaagacagggtttctctgtggctttggaggctgtccttggaactagagcacacgaccaaactttaaaattggtcagagaggcaaaaaaagatgaatttctctgttcaggcaaaattgaaagcaaagcactactgacatggatgcaggtgtcagctcccttactggagcctcctttagatacatatcatccattttttgaaaatgacccagaagccatgcaatagttgtgttcttaatactgtgttcctcctgattttaaaaaggatgtaatagctcaacatgcgtcaaagccttcctgggtttctgcatcattgctctcactcacctgctctgaggatcctgattttctcttcttgtagccaaccatcatccctgttaaagagccacttgtcactattctagagacagggggccctgggagaactgagctggtgagtgagacacgctgcagtctcatgcaatagccaactttattcagagctccatacaatgtatattctgaaggttaataaagattacccgagtaaagttgtagtgtgttcaaactatgtatgatgaaaacagtctgtaagggacaaaagcattgttttccatgaaggcatataaagcatagtttaactggatgaaaaatagtaaacaataatgggcaatatgaagtaaagccacgcctaactgttaaattgaaagacaagccatagtccaagaagaaacttaagtcacaattgtcttgtcttgttttttttttttaaataatttacttaactttattttatgtgtattggtgtgaaggtgtcggatcccctgaaactgaagtaacagacagctgtgagctgccatgtggtttctgggaattgaacccaggtcctctgaaagagcagccagtgctcttaactgctgagccatctctccagcaccccccctttttttttcttaagtgttgacgcaagtgcttaaaattctcctcacatgatttcattcatggacactgttccaacaatacacatgaatacaagtaattttattttatttttttaaaaaaccatggcatatacatgaagaaagctctttttaaaatacaaggtcaatctcctcttccccctccttctctctgtctctctgtttctccctctccttctctcttatacacacacacacacacacacacacacacacacacacacacacacacacacgagcacatgcacatgcgcctttgtactgttaacatgcccagacctcctggtctacaatgcataggtactcctggggctcctgatgtgggtgctaggaaccaaacttgggtacccaacagccgcagtgctattgagtcgactctcgagctcccaaagatgtcattataatgcaggaaatgaagatgtccctttactactacttccttccatcatctggagatgacgaaagtccctacaactgaggcaaggaaggcctgaatgatagttctacaacatgtgtctcacgtggctatgattcaaattgtgacatctattatggcattgcttccgtgtcttgtccttaaaggaatgctttgcgaatggtgatcagctacctgacattgaagtacatggtgccatgagaatttaataatcatcacaaacctatgcttatttacaccattgcttttcattcaaagttcagggtataataacatttcttcagacatacataagtatcagctcgcacatgaaaattaccttcctgctgggcagtgatggcgcacacctttaatcccagcactccggaggcagaggcaggcctgaatggactccggacatactttgttaacagttctctctctctctccctccctccctctccctcccgtttagtactgaggttaaaccccaggtctcacacatacaaagcatccaattaaggaaaccggaggccactagacaagagaaacatctgaagaaaattgtcctatgaagaagcggagccccagagtagctctggcacccacgccaccatcttgcctgattggctgctccttcccacaggtcaactacacaatgtgggcttggggttggatgcaccctgcaggccttccctttcttccctccctgaggctggcgacccaaggtggtttcccaaacgcttgtctctgctgccctctacagacataagtttgaaatggccattcactttatgtggtcccaattcaatcaaaatttaaagctggctttggagttggaatgtggctctcttctctaaacccatgcatttttcataaaggaaaacccaaaatctctgtctcacatcagaagagtcccttggaatggggacaggggagaaaccaaacttaatgttgccacgaatcttataatctttgactctctaaaacttactcttaaattctaaatcttatctcaagatctgtaagattattatgtcgttacacagagtaccaacccattctagaataagcttcgtctagcttcctgtatgtgtttttgggtttgagcctgaagtgggtaactaggaactaagtttgcatacttcagatatacttaatagattgtggtcctcaacacaagaggagacctgctgaatatggcatttaaaaagttctttttttccgagacagggtttctctgtggctttggaggctgtcctggaactcactctgtagagcaggctggtctcgaactcacagagtttgaaagctgaaatagagacaataaaaaaaagaaaaaacacagtctgagggaatgttggaattggaaaagctgggtaaatgatcaggaactacagatgcggcataaccaacagaatacaaggtgttcataatactcaaggagaaatagattcattgatcaaagaaaatctcaagtccaacaaatccctaacacaaaatatccaggaaatatgggacaccgtgaaaagaccaaacctaagaataataggtatagaaaaaggtgaagaaacctaactaaaaggtgcagaaaacatattcaacaaaatcatagaagaaagctttcccaatctaaagaaagacatgctgatgaaagtacaagaagtctatagaacaccaaatagagtgaaccataaaaaggtcctcttgccacataataatccaaacattaaacatatacaatagagaaagaatactaagagcagcaaaggaaaaagtccaagtaacatataaaggcaggtctatcagaattacacctgacttttccatggaaactctgaaagccagatggtcctatatagatattctacaaatgctaagagaccatggatgccagcccagagtactatacccagcaaatctttcagtcactatagatggagaaaacaagatattccatgacaaaaccagatttaaacaatacatacccactagtccatccctacagaaaggaaaactcaaacctaaggaacttaactacactcacaaaaacataggcaagggcattggtggcgcacgcttttaatcccagcactcggaggcagaggcaggtggatctctatgaattcgaggccagcctggtttccagagtgagtgccaggataggctccaaagctacacagagaaaccctgtctcaaaaaagtaaaacataggcaatagataatcccactttaccaaaagccaaaagaaaaaatggggtaaatccacacacaataccaccaccaccaacaaatccaaaacaaacaagaattaacactcaatagagcttaatttccctcaatattaatggtcttaatttgcctataaaaagacgcaggctaacagaatggatatgaagacagaatccatccttctgctgcatacaagaagcacacctcaacttcaaagacagatcttacctcagagtaaagggttcggataagatttttccaatcaggggctggagaggtggctcagaggttaagagcactggctgctcttccagaggtcttgagtttaattcccagcaaccacatggtgactcgcaaccatctgtaatgagatctggtgccctcttctggtgtgcagggatacatgcagacacaacactgtatacataataaataaataattatcaataaaatattttccaatcaaatggacccaagaaacaagctgatggggtgatcctaatatctaacaaattagacttcaaactaaaatcaatcaaaagagatggagaaggtcatttcatatttatcacaggaaaaatccatcagaatgaagtctcaattctgcacatctatgttccagatacaaaggcataaaagaaacattactaaaattcaaatcacacataaaatctcacacaattatagtgggagacttcaacaccccactctcaccactagataggaccaccagacagaaacttaacaaagaaacaaaagaactaacagaagttatgacccagtcgggtttaacagacatctatagaacatccatccaaacacaaaagaatataacttcttctcagcgccacatggaaccttctctaaaattgaccacatactcagcaacatagcaaacctcaacagatacaaaaaatttgaataaccccctgtatcttatcagaccaccatgctttagagttagaatttaacaacaacacaaattgcagaaaccctatgaattcatggaaattgaacaatgcacaattgccctattcctggctcaaggaataaataaagaaattaaagactttctagaattcaatgaaaatgaagacacaacatacgcaaacttatgggacactttgaaagcagtactaataggaaagttcatagcactaaaagcccacataaagaaactggagaacagtcacactagagaattaacagcacacctgaaagctctagaacacaagccaatgaacccccgaggagtagatgccaggcagtaatcaaattgaaggctgaaatcaataaagtagaaacaaagaaaacaatacaaagaatcaatgtgataaagagttggttcttcgagaagatcaacaagatagaaaaacctttatccaaactaaccaaaaggcagagacagcatgctaattaacaaaatcagaaatgaaaagggggacatgagaacggacactgaggaaatccagagaattttcaggtcaaactttgaaaacctgtactccacaaaattcaaaaatttaaaggaaatgaacaattttctggatagacatcacttaccaaaattaaatcaagacagataagcaatttaaacagacctataacccctaatgaaatagaagcactcatcaaaagtctaacaaccaaaaaagcccagggccagatggtttcagcccagaattctaccagaaattcaaagaagcgctaataccattactcctcaaattgttccacacaatagaagcagaaggttcattgccaaactctttacaaggctacaattaccttggtacccaagtcacacaaagacacaactaagagaactacagaccaatatcgctcatggatgttaatgcaaaaatactcaataaaatacaggcaaattgaatccaagaacacatcagagaaatcatccaccatgatcaagtaggcttcatcccagagatgcaaggatggttcaacatatgaaaatccatcaatgtaatccaccatgtaaacagactgaagaaaaaaaaaaacacatgatcatctcactagatgccgaaaaagcctttgacaaaatctaacaccacttcatgataaaggtgttggagagatcagggataacaggaacatacctgaacataataaaggcaatatacaggaaaacaacagccaacatcaaactaagtggagagaaactcaacatgattcctctaaaattaggaacaagacaaggctgtccactctctccatatctcttcaatattgtacttgaacttctagctagagcaataagacaacaaaaggagatcaaggggatacaaactggaaaggaagaagtcaaactttcactatttgcagatgatatgatagtttacataagtgacctgaaaaactctaccagggaactcctacagctgatacacaccttcagcaaagtggcaggatacaagatcaacttaaaaaaatcagtacccctactatatacagacaataaaatgggctgagaaagaaatcagagacacatcaccctttacagtaccacaaacaacataaaatagcaagaactttgagtctttaaagaaagaaattagggctggagagatggctcagtggttaagagcaccagctgtccttccagatgaccttggttcaattcccagcacccacatggcagataacaactgtctgtaattccaaatctgacaccctcacacagacatacatgcaggcaaaatgtcaatattcataaaaataaaaataaataaataaaaaagaaagaaattaaagaagatatcagaaaatgaaaagatctcccatgctcttggataggtaggatcaacatagtaaaaatggcaatcttgccacaatcaatctacagattcaatgcaatccccatcaaaatatcagcacaattcttcacagaccttggaagaataacactcaattttatatggaaaagcaaaagacccaggatagccaaaacaaccctgtacaaccaaggaacttccagaggcatcaccgtctctgacttcaagctctattatagagccatagacctgaaaacagtttggtattggcacaaaatagacaggtagaccaacggaatcaaattgaaaacactgatattaaccaacgaacctacgaacacctgatttttgacaacgaagctcaaattatacaatggaaaaaagaaagcatcttcaacaaatggtgctggcataactggattcggacatgtagaagactgcagatagatccatatctatctgcatgccatgcacaaaacttaagtccaaatggatcaaagaccttaatataaatccagccatactgaacctcttagaagagaaagtgggaggtacctttgaacgaattggtacaggagacagcttcctgaacataacaccagtagcacagacactgagatcgacaattaataaatgggacctcttgaaactgataaacttctgttaagcaaaggacacagtcagcaagacaaaatagcagcccacagaatggtaaaagatattcaccaaccccacatctgacagagggctgatttccaaaatatacaaagaactcaagaagctagtcaccaaaatatcaaataatccaattaaaaagtggggtacagaactaaatagagaattcccaacagagaagtctaaaaatgtctgaaaggcacttaagaaagtgctcaatatccttagccatcagggaaaatcaaatcaaaacaactctgagataccatcttacacctgtcagaatggctaaaatcaataacaccaatgacaatctatgctggagaggatgtggagaaaggggaacactcctccattgctagtgggagtgcaaactcatacaaccactttggaaatcactatggcggttcctcaggaaaatgggaatcagtctaccacaagattcagcaattccactcttaggcatatacccaaaggatgcacattcatacaacaaggacatctgttcatctatgttcatagcagcattatttgtaatagcctgaacctggaagcaacctagatgcccctcaactgaagaatggataaagaaaatgtggtaaatttacacaatggagtactactcagcagaaaaaaacaatggaatcttgaaattcacaggcaaatggatggaagcagaagaaacccccctgagtgaggtaacccagtctcagaaagacaaacatggtatgtactcactcatatatggattttagacatagagcaaaggatttgcagcctgcaatccacactgccagagaagttaggaaacaaggaggaccctaagagagacatacatggtcccctgaagaagggaaaaagggacaagatctcctgagaaaattgggagcatggggggaggggagagggagttaggagaaagagaaggggagaagaggaggggggaagaagacatgagggaacaggagcattgagtcaggggaagaataggggagagtaagaaaagagataccttaatagagggagccattataggtttaaagagaaatctagcactagggaaatgttcagagatctacaaggatgacctcaactaacagtctaagcaatagtgtgaggcaaccttaaatgcccgtccctgataatgagattgatgactaacttataagctatcctagaaccttcatccagtagctgatggaagcagaagcagacacccacagctaaacactgagctgaattctggaatccatttgcagggaggaaggagtgatgagcaaaggggtcaagaccaagctggagaaaaccacaggaacagctgacctgaacaagggggagctcatggaccccagactgatagctgggaaaccagtataggactgacccaggccccctgaacatgggtgtcagttaggagacctgggcaatctatggggcctctggtagtggatcagtatttatccctagtatatgaatggactttgggagcccattccacacagagggatactctctcagcctacacacacgggggagggcctaggctctgctccaaatgacgacagactttgaagattccccatggaaggcctcaccctccctagggagcctaaaggggatgggatggggaggtggtgggggacagggaaggaggggagggggagggagaggaactgggaatgacatgtaaaacaagcttgtttctattttaaatttaaaaaggaaaaaaagagtttgtttgatttatcattttttgacagatgaatcaatttcctctatcatatcttcaatgcctgagattctctttttcatcttttgtattttgttggttatgcttgcatctgtaatttctgtttgtttacccaggttttccattttcagaattccctcagttttttttttattgcctctattttaattttcaaggcttgaactgtttccttcgcctgtttgtcttttccttggctttctttaagggatttattgattttttttccagtgttctgttttccttttcattgatttctttaatgaaaaatttcctttcctcttttagggcctctatcatcttcataaggctgttttaaaggttgttttcttctgctgcatctgtgctgagatgctcaggtcttgctgttgcagaagcactagtttgtggtggtgctttattgctctttatgttgttcattgtattcttatactgtcgtctacccatctgggtttcaggtaattattggtacaggtgttgattcttcctgcaattggtgcaggtggttctgtgcctctgggcccactcttccttcaatcactgccattgatttctgtgcctccaggggctgctgataccatgggggatgattggctattgggaggatgatgggttccatgaatttaaggggtggagtgggacttgtagtttacagggtctattggttggtgggggtggtgggacaacctgtatgcaggagtcttaccagctgactgtcttctggagctgtgctgggacagagagaggcttggtctagggcctagagaccagggctatacagctgggagatcactcactcaactcttccttcaattggtgcaggtggactctatgcctcagaggcctctggtgccatgggcgatggttggggtggggagaggatgatgtgttctgtggctttttcgggtggggggggctgagtgggtcttgtgggttacaaggtccaatgggtgttgggatggtggaacactctgcccacaggagtctcacctgctgaccccattctcaacattacaatgtgggatactttaggacatggtgacctatgaggatgtgcatgtgaacttcactcatgaagagtgggctttgctggatccttcccagaagaatctctacaaagatgtgatgctggaaatttcctggagcctcacttccataggtgagaatgtgagattcctgtcaccttttaacttaagggttgacatgcctttcttggagatttgtgctctcctgtgattttgaatgctgtagtagaaaaaaaatctggtgactaaatcaggcactattttaaggtacataaaagatactgatttcaattgttcctaatttccagtaatataccacatacatttttctggtactgtattttagggtacaaatgggaagaccacaatattgaagactattcccaacattctagaagacatggaaggtaattttcatgtgcaagctaatgcatagatacatctgaagaatcttaatgtaccccgaacttttaatgaaaagcaagtataaataagcacagctctgtgatgattattaaattttcacaccaccatgtactccaatatcaggtaaaacattcctttaagaatatgacaagggagggctggagagatggctcagtggttatgagcactggctgctcttccaaaggacctgggttcaattctcagcacccacatggcagctcacaactgtctgtaactgtcagttacaggggatctgacattctcacaccaatgcacataaaaaagaataagacaaggaaacagtgccataacagatgtcataattttaatcatggccatatgagaggcatgttcaccaacttatgttcataccattcatttatcataaatggtatacacattgataaggggattagtgtatttccaagaccttttataagcaaatcttccatattaaaggtagtgttctttatatacttgtagtaatttatttagcatagtttagtgagcagagaactttatgagagaccaggaggttgtcatggtctagaaacttgaatccctttatcacagctctatgagacacagaatgttagactgtgtgaatgcaatatgcaaaccttttgttattcttcctctaccacgtatgacatctgtcactctggatacaagtcctgtgagtgtaaggggtatggaaagaaacattgttcttctgtctctctcagaaaaaatgagcggtttgtagtagtccccaacatgagaagacatgatgactgtggcacaaatttacagttaagtggttttccaacttcagtgggaacacatcaacaaactcttgatggagaaaagccttatgagtacagggaatatggaaatttgactgttctggttcactttgcacacgtagtgtgtctcacagtataagaaaatgttacacatggaatctgtgtggtaaaactttgagttctcttcaaagacgtgaaaaaactcatattggaagagaaagtaacaagtgtgagccatctactaaagggtttagcactcataggtatcctcaaacacacaacacaaccagtaatgaagaggatcttgatgaatgcaatcaatgagataaagcctttgtatgttccagtgatcttcaaatacaaaaaagaagtaattctggagaggaatcctatggatgtaatcaatgtggtaaagcctttgcctataaaagccttcttcaaatacataaaagaattcatactggagagaaattctgtggctgtaattactgtggtaaaacctttgcatataaaagtaatcttcaattacatgaaagaattaatactggagagaaaccctatggatgtaatcactgtggtaaagcctttgtatgcaaaagtgatcttcaaagacatgcaagaattcatactggagagaaaccttatgaatgtaatcaatgtggtaaagcctttgcacagaacagttatcttcaaaaacatgaaagaagtcacagtggagagaaaccttatgaatgtagtcaatgtggtaaagcctttgcacataacagtcatcttcacaggcatgaaagaattcatactggagagaaaccctatgaatgtagtcaatgttgtaaagcttttgcatgtaacagtaatcttcacaggcatgaaagaagtcatactggagagaaaccctatgaatgtaatcaatgtggtaaagtctttgcatacaaatgtcattttcagaggcatgaaagaagtcatactggatagacaccctgtggatataatcaatgtagtagagacatttcatgtaacaatcaccttcaaataaatgaaagaactcaaactgtagaaaaaccctatgaacgtagtcaatgaatataaaattatattcactgtcataaaggaatgactagagaaaaagccctatgaaagtaatgagtgtggtaaagtctttatatgttgcagtaatcatcaaaaacatgaaaaaattcatactgatgaatattcccatgaacctaataaatgagctttgcagtccacatacatttttacccctgagctatctcatcatttcgtgagtagtattagtagatctattgttaaaatattgtctccttttcaagttgtaaagatattgtattccaagaatatagaaacacatgatcattttaatagtaaaatgtattttcaaatgaaattgatatgtatgctgtcatccattacttttggatcatcttaatttattctgaggactaaatacttgttcttaactttttccctgaaatgaatgccaaagagttttatcagtgggtaaatatgactgctatgaagctgacaacctgcattcactctctggaagacccacgttatccatagaagtttttctttgatgactacacttgccttgtatgcacaccacacaccaacacatacagaaataaggtccagagagttcactcaacaatttagggcacttattgccaaacttgactaccacagtttgatttctagaggacagagagctgtaagttgctctctggctggcacgtgctcttcatggcactgctgtttacacataactaactttattcactgtgcagccctgactgtcctggaggtgattctgtagaccaagctgaccacaaactcaaagagatctgcctgcttctgcctcctgagtgctgggattagaggtctgtgttaccacgaccccatcagttaaaaagtcttaaaggaagaaaatttacaatgcaaagaaattaaccaaaatattgagaacataagataacacttaccagttgaatatattggaaaatcccaagaagtattatttttcattaaaaaatgatgcttcctgttttgatttatattattctttcactgtctgattcaaagatagattatttaaataacatcacacccatgtgtgcagctgcactcttgcaatcccaggacgtgagagagggaggcaggtggatctctctgaatttgaggccagtctgtcccagatctcagttccaggatgaccatagttatatcgaaagagactgtcttgaaggccccccccaaaaaaaaaaagaaagaaaaacccaaagatagttgcttttccagacgacccaggttcaaattctcaacacccaagtgggcacccacattcaggggggcctggttcagttttatgctggttctccagctggtagactgggacccatgaactcccatttgcttaggtcagctgtttcttttttttttttaaagattttatttatttattatgtatacacattttgcttccatatctgcacaccagagggcaccagatctcataacaaatggttgtaagccaccatgtggttgctgggaattgaactcaggtcctctggaagagcaggcagtgctcttaacctctgagccatctctctagccccggtcagctgtttctgtgggtttccccaatatggtcttgacccctttgctcatcactcctccctctctacaaatggattccaggagttcggttcaatgcttggctgtggatatctgcttctgtttccatcagctactgaatgaaggctctatgatggcatataaggtagtcatcaatctcattaaaggggaaggccatttaaggtagtgtctccactatttaaggcaagtattttaaaggaaggcatttaattatagtttcagattattattctattaccatcatggtgtggagcatagcagcacccaggcagacatggtagctgatagttcatccagatctacatgtcgcctgaagaaggaaaggcactgggcttggcttgggcccttgaaacctcaaagcctacccccagtgatatacttgcttcctcaagaccacacctattgcaataacaccacacccctaatccttctttagtaactccactccttgaattcatgactaagcattcaaacatataggctaatggaggctattctcagtcaaagcaccacattatcgcttttcaaaatttcatttttgtatataggtcactactctaatctgcgtttcctcccattccccaaggtctctcagtcattagaaaccctttttcctatttgccacaaatagttatttatttatttttagaccaaggtatcaggtagatgtcctaattttggtttcttttgctgtgatgaaataccatgccaaaaacaagtttgggaggaaccagtttatttggtttcacacttgcatatcactgatcatcctcaaaggaagtcagaatagcaactcagacaaggtagggatctggaggcaggagctgatgcagaggccatggagggtgctgcttaccctattactctccatggcctgtgttattcttttggttaagctgcagctgctgatataaagaaaggaacaacggataaacaacccacgtggagtttatttaccagaaaaggggggagatggggatgggtagtcagccaacccaagaggagccaaaaggaagagatcgagggatgggtggcaggaccttgttcttagtcatcaagaattgctttgaacacttaaaaccacttgtgccactcagtcctggaaatacatatattgcaggtcagtgaaaaggataatgagacagggaatgaatggtgttctagaatccaggttcttattggtcatgaccccttatcagtgagaagaccctgtagtaacccacattgaggggcatctttctgttgggtccagctgacctgtctggtctatatctgagaaggggagtgtggattgaggaaagaaataagcaagagacaagagatagagtcgggagggtacctggcgaataccaggatcagcccaagtttattattcaaagctcatatatcccaatccaaaggggggggaaggcaaagacttccttaccaagacacaaaaaaataatcaagtgtaattaccttctcagataccccaaacatctggtaaccacacccttaaaccaaatatccccttgtcaagatgagacatctgttagttacactttaggccaaggcaaaatacacaatagtcacaccttaggccaaacagtctgttgtttaacctttaaagagcaatagtatatctgaactctctgaccttaagtcaaaatgaagctgagccacttttaagggtcccatcaggacccctaaattctatttaaaggaaactcttcttaccttcttcaagggtcacgtgtcccactttgagtaccgattgtgggggtccctgcaaggtgagaatgaaaacccagtgtagactgatgtcgacagcctggatcagacttcgaggaggctactaccaagtgtatcatgtcagcatattgaaaacacagtacgatttgggaaaaggtttccatgcaacagtccaattccaggtgcaccataaagcttaaggtgtattccataatcctttacaaagtcatgtgaccatgagggtgggttctatagctaaaaggcctggaatctggtgtgatctctgaccaacaaagcatagagttcagcaggccacagagagcatgtgacatctcccctccagtgctcaatgaactagggaggaaagactcgggtaatcactctggagaagagcggtgaggtctgcctctatagcgaaaggtggatgaggtctgctcagcagacagcagaaaggtcaccaggtcattaacaaagtccactctcagccttctggatggaatggaggtattcggttagtatctctcccactgagcagacagccctgggtgcttcacttcctggtcccattacagcttctctgtgagtaccaggacctctgtgccccccacatcccgccattctgtaatcatcattagcacgtgactccacctgcttttttccaagttcgggtagaaacaaggagccctgggaaactacattacctgaggcagactgagcatgccagtcaagtgtgagtgtggctttcaagaatgctcagtggagggcctgcaagcaggacacaggacaaaattcatccccaaaacagtggagctcacagtaaagcagccaggcaggcttcttcccattgccgctgttcctgcctgctgcttcagcaccattgtggattccagacagggatgtctaaaaagtggactgtggaaatgggggtgaagaccagggtgccatagacccatgtggccctcaggacaaagactgacacttatggtccaaaactctggaatgtcagaggctgcacatttgccatttgctctaaatctcacactggtcttatggacagtgcaattttatgccacacctagttctgcttatttcattagtaaatgtgcagaattaataggtgtcaggcatggggtgcaggcctgtaatcttagcactccgcagcagagggaaaaagatctttatggacttttaggctagcctggtctacacagtgagttcctgtctagccagggctgcaaagaaaatgcaacaattgtagcatgatgtaaaaataactattcttaatttggcttacttaatttcactaatgatgcagaattgagaggaaaacaaatctggaagctcctatgtcaagtaggcaataaaatattcatagtcatcagnnnnnnnnnnnnnnnnnnnnnnnnnnnnnnnnnnnnnnnnnnnnnnnnnnnnnnnnnnnnnnnnnnnnnnnnnnnnnnnnnnnnnnnnnnnnnnnnnnnngtgagttcctgtctagccagggctgcaaagaaaatgcaacaattgtagcatgatgtaaaaataactattcttaatttggcttacttaatttcactaatgatgcagaattgagaggaaaacaaatctggaagctcctatgtcaagtaggcaataaaatattcatagtcatcagaatattgaggctctatagtaaatgtggagtgattaattcaaagaagttcgcactgatcccatagggtttagttcactaaaattatttatattgatggatcgtttctatacaataatagcttaaaagacagcaaattcctggtgtgtattttttaaaatgaaactttatttgtacaaaaatgaaaatcagcacgttttccacagctgggctggtttcctttgtcctttctcagtttcgtagcaaaaacctcactaatgccggagaaatgagtcctactgggtgcaggctgagttcaggggagactttatttacagcccagccccaagttctgctccagtgccagtctctctagttctgggggagttcggtgcctggagtggaggccaggtctggcaaccactgtgtggggtccattgacaacaagagtgtctgtcactctggtctaggcagccaatcagggcctccagatggactgccagtcagatggaggcgggaacttccggtctcccacgctgtagtccggggcgaccgtgagtgaggaaggctgtagtgtcgcgagtgctgagctgtgacccggtgccggcagccgtgaggacagcgcggcgagcacggaggccgccatggtgagcgagcggccgccgtccgcacgcggggagccgtgccggagcgactccgcttgtcccaagttccctgcagccccgggcagaagcggggcggcgaacggctctgcctgatgcgcccgcccgtgcagagcctggggggcgggagagctggtgtgcacgcggccttgtcaccgtgcagggcccgcgcgtgcactgttgttttgttttgttttgttttgtttttcttttactgtggccagggaaggcacatttgctaactcacagccctggtcactctagagtcttctagaagttctgcacttgtcactgaacattcaggtgtaaatccgtctgcagttagttctgtgcagggcgtaaagtctgtgtcattaacacatttgcatgtagattccaggatggtctagtcactgggtttcctggcctctattaattgtgtttttatttctaagtttgctctcatgttctgttgatttctttattctttcccagacagtaaatctccgcaccccccattgg

SEQ ID NO: 6 - DNA, 80998 bp, Cricetulus griseus
  >scaffold_2 dna:scaffold scaffold:CHOK1GS_HDv1:scaffold_2:8990390:9071387:1
  misc_feature 16108..16207: /note="n is unknown"
  misc_feature 62415..62514: /note="n is unknown"
  misc_feature 64900..65000: /note="n is unknown"
  misc_feature 67818..68017: /note="n is unknown"
  misc_feature 70114..70213: /note="n is unknown"
agcttgtgcacccccccccttgcctcccaacacacacacaaggattctcagtgtggcattcagggacactgcatataggctgtagacagcataggggcaacgctgccttcattaggctcagcaccttccacttttatgagggtactggctgtcgtcaggttaccctggggacaggacagagagaggctaccagacaatgtggagaggagaggtaggccccgcctctccagtgcactagtgaactcagccttcccggtgctgccacaaaagcaccaagaatgtgcttgagcccatggccgttccacaccctgtgactccctacccataaggccatggcctttccagcagctagcaaaaggagctgatttcagaagaggaaatcggatggcctatgtcaccagtgtggctatcaagtagcagcagatacccagccataagcctcagaccaggccagggcagggtgtccccttctttgaaggactggccccaaaccccacctccgtacagaacagaccctcctcagatccgcaatgttgcaaccagatgtatctgctggcctggctggcccggtggaatgcactgctggctctctcagggagcctggatcctgccccttggggagaggttgagctcaccagttttctccattcctctttttgattggcactttaatgagggcagaaggggctgaccccctgccaaggggccagttcatgctccgtttatctcacagcccgagtcagactaaaacaacactgcaggcctagccgccaggagcctgggggcctgccgcccccaccgtgggtgatggattgactgaccgcagtgagctggcagctgaagtgtgtggtggctgcacctccctgtcagtgtgcaacaaaagagcctggccccaccggcccgctggccaaactgctcccctccttggggcagctccagggtcttggccttcctccctgcctcctgaacaccagcgccaagctactcgagacaggtctggggaccggagcctgatacactctggaaccattctggggttctgggggcaatgcctgggtgggggcattctgaggttgcaagcttggctgaccattaaatgcttccttgtttgggttccaagctttagggtctgagacagagtgctcttctcagccagtgccccctaggtatacatccaaacagccctgagcccactcacggggagtccatttgctgtgcagctgtgagtgagtgtgtcaaccttgctgaacctttggcttctctttggtctttccctcattggcttcttatgagactgaaaatgagggctgccagcaagccctgcagtcagatggagcacaggatcctaaagccaggcctcagcttacctgattggcaacaaccttccccccagcacccatagctcggttgactttattttttattagatttgtttatcgtgttggtgtctgtgtgtgtctctgtgtatgtgtgcctgtgtgtgtgtctgtgtgtgtgtctgtgtgtctgtgtgtgtctgtctgtctgtgtctgagtgtgtgtgtgtgtctgtgtatgtgtgtctctgtatctgtgtgtctatgtgtctctgtgtgtgtctatctatgtgtgtgtctgtgtgtgtctgtgtgtgttcctgtgtgtgtctctgtgtctctgtgtgtgtgtgtctgtctgtgtgtgtctgagtgtgtgtgtctatgtatgtgtgtctctgtatctgtgtgtatgtgtgtctctgtgtgtgtctgtttgtgtgtctctgtgtgtgtctatctctgtgtgtgcctgtgtgtgtgtctgtgtgtgtctgtgtctctctctgtgtgtgtgtctgtctgtctgtgtgtgtctgtatgtgtctgtgtgtgtctgagtgtgtgtgtgtctgtgtatgtgtgtctgtatctgtgtgtgtgtctgtttgtgtgtttctgtgtgtgtctatctgtgtgtgtgcctgtgtgtgtctctgtgtgtatgtgtgtgtctgtctgtgtgtgtctgtgtgtgtctgagtgtgtgtctgtgtgtgtgcctgtgtgtgtgtgtgtctgtgtgtgtgtgtgtgtctgtatgtctctgtgtgtgtctgtatctgtgtctatgtgtgtctgtctgtgtgtctgtgtctggttgtgcacatacacacacacacacacacacacacacacacacacacacacactcatgccatggtgtgcctgtgggtctcagaggacaacttgcagaaatcagttctctccttgtactatatgggttccaggggaccaaacttagcttggcagccttggcagccaacattgtcacctactgagccattttgctggcccctttgcctgactatctgaggagacaccagaggcaaacctgacgtctcaatcaagagttatcacatgccctccactggcgccccatcctacaacttagggatggcacccactttacacacacggagaatctgaggctcacagatgcccgtctgcccagtgtagtgcagagtggagggagagtgatttcaaccacacaaggctctgaagtccatgaagttactcccaaggccctgagttaaaggccagaatccccctctggggaaaaggaggcagcttcaggtgcccccagaggtgaagagccaaagcacggtttgtagcattttctgggccacctggggcagtcaagatgccaggctgtctcagggctctgctggtgtcatcaagtgaacttgaacccttagctattccccagacctcacaggaagcagttgtcacagaaggaaatactcctcccccttcaccttagaggcattgccatggtgtgtccgctgcctcagggttccctagggccctacaccaggaacaagacagtcacgggagtccagctgtttggttccttggagcctcatctatacacccaggcctccctagagtgggaaggagccaatctccacttggatgagacatcacctccctgtgaactcccaaagggcaggaggccaagtcccagccgaggtcagacaaagtagcacggccatagtgggcctccacgtggtccttctcaggctccctggctcaggtcctccaactccagcattgatgccctccccattggacaaaaggtgacttacctgaacaaggcagggcagatggggcctcggggtgggttaagtcccaaactctgagccaacagatgagtaagagcagtctttggacctttagttaggtcccagaggcctggtgctcagccctgagtctggcctggagaggccttaaaacttcttttccaaagtcttttcatcctgcctgtcaactccaaatcagcttccagcacccttttgacatgtcacctcccagaaagccttccctcactgacccctctcccagacagcccccaccccaagacagagccccgttctgggtcaggctctggggggctccctagggcctgcctaagaggatgtcaggcaggcagagctgtctctgcttgcctaagttcccagcagctagccaggcagatgtctgacgtttgccggatgcgcacctgacaaactccaccagggagtgtccagggaccaatgtgttttattcaccactgcagtccccaaacctaataggcttttgtcggatatttaatcaatggatagggaggggtgtgtgtgtgtgtgtgtgtgtgtgtgtgtgtgtgtgtgtgtgtgtgtgtgtgtgtgattctaacataatttaggatatctctggggggggtggttggaacagacattaaaagataaacttcccagtattgtatacaaatgttacaaagcaggatacaaaagaggaatggctacaatatataaagagccaaggggaagaggaggtgggaagattctcagagcctgaggggatgaatgacctactaggaaataagtgttttccagatacaaagagactggtgcacatacgaactcacagagattgtaacggcgtgtgcaagcttgcacaggtcccgccagacagggtcccagcacccagaggggcagtgtataggagctctcatttctaaccaagaagttatctccaactgacaacttctcacaaaggaaaaatgagttttctccaatggagtctttctgggtacacaaaaaccacacttaggggtaggccccatgcccagcaagagatagccaacagaaaagaaaatcaatgatgctcttgtagatctatttttggcacatattgttttgttcgggcattttatttttatcctattggtcttttgcttgtatagtacagttttcaattttgtgtgtttataggtttcatttctggatatgtgtatgtgtttcttgtgtttttttttccccctttgtttcttattctttgtgtttctttgcctgtctgtttgcctgtctgaaagagataaagttgggtgggaggggataggaggtagaggggctgggagagggaaaactgtaatcagaatatattgtgtgaaaaaattcaatatctatgtgtgcacggatgaattttctatccatatggtattgttatattgcaagctgcctaaaaaacaaaacaaaactcaattcatggtggactgggcatgcggctaagttggtggtgccttgcaagaggacctgagtttaagcccgggggcccatgtaaaaagccaggcaagggctgggcagtggtggttcatgtacttaggaggcagaggcaggcagatctctgagttcgaggccagccggggctacacagaaaaccttgttttggaaccccctcccccccaaaaaaaaagccaggcaaggggatgcatgcttacaatcctagcttgggctcactagccagccaatcatggatgggtgagcaccaggccaatgagagattctgccccaaaggcagtggtcagtacacacatacacacacacacacacacacacgcacgcacgcacgcacgcacgcacgcacacatgtgtgggtacatattaaacaaataagaaaagatttatagggccagtgagatggctcagcaggtaaaggcacttgctgcacaagcctgctgacctgaattcaatccccagaaccctctagatacacactcgtgcctatacatcacccccgacacacacacacacacacacacacacacacacacacacacacacacacactgcagcagcagcagcataacaatactaaattggaaatctaaaagaagactgcagccatggccgccaagatttgcctgctgtcagcaaggtgagggtcgtctgcagatgagcactgaagccactggctccctgagaacgagggagtacctaatgtctgctttcattttccccttctctcctgccacaacgtcattttaataattctgggcaactatcttaaaacaatgagcccatggatggctcatccactctgggaagcccctggcccaggaactgtgggaaacacaggaagcagaaaggtcatggtctatgggggaaatcccagtttgatgacgggttcggcttcggaggacatgcctctcctggctgaccacatggcccacgaaaagaaaaatctttgtgtgtgcgcatgtgtgttcacgggttcatgtatgtgagcacagtgtttgtagaagctggagctttggttcctgacttccatcttgttggagataactgtcatctccagtttcttttctgttgtgtgtgccaggctagctggaccccgagcttccgaagggcccccgtcactgctcccatttcaagtttgagcactgggattacagatgctggctactgcgtttcactttggggtgggttctgggggtttgaactgaggttgcccttgaatgctttaccatctgcccagcccacgtggtccatttttttttttcttcttaaagtagcactttccaaagggtcacccaagtttaatgtgaggccacaattcttccttccttccttctccccttctttcccctcctccttcctccctcttttcctttgttcacctgacggctgaacagagaactttctggacagacatatttgtaacgaggtgggctaggaagaacctcttggactctatgaaagtttagtcaaaactcaaattatttcaaccttcattttgttgttctcaagactggtctcatgcagctgaggacgaccttgaacttctgattctcctgcctcccatccggttccaaatgccaggaccacaggcatgcgcccccacacccaggttatgctgtgctggggattgaatccagggcctccgcatgctgcaagcactctacctatcaagctgcatgcttagccctcatcactcatttttaacgctagtgaggactgttggggtggagctcagctgtaggccgcccacctgcctagtgtatgaaaagcctagggctgatcaccagcactgagtattgtcagaaatgctctgctcatgtgagaacctaaatggtggtttatgagatcccaagaagaaatccagaaaccagcactctgtgtccaaagaccacctgcaactctagctccccggtaatgacctgtgaatgtcagtcaggtgacaagcagagtccctcccagcaggccctgtccccaggcctccaggattctgaactccaaggagcagagataagagggctgatttgtgctaccctgcccaactcaggaatacaactggagtggtcatgctctttaatgtcacttcacccctgactgaagaggtgggacagatggctctgggtgccacagaggcacaggtggcttccatcaaagacatcagctgggaggaggagagagggatgagggatggacagaacctctcttcctatgaggatctcaggcctgctagcactgaggaacatccccagggatggaagaaagttccaggctgcggctgagaccatagatttcaggctttcattgactccaggtgtgctggctgcttttgagtgtctgtcactgcgaagatggagcccgacacttctactttcttcccagccccaagctggtcttcatccctcctcctttacttactcaggggaccaggacttcctagtgagttgtatgtggcctttcttcctcagcccaggaagactggggctgtgtgcccgttccaccggagactgaactgagctcagggttgggagcatctgtgtcacaagattccactggcagagctgggtgattcatcccgacacccacccatgcaaggtcttccctgtgtttggaagatgagatagagccctgtcagagggatgggaggccgatggcaggacattgtgcagagaagcccaaggggaaagccacgtctgtgactctggtctcagcccttgctcctttccctggataagcaggcctggccagctcttcacttagcccaggccactctcttcacacagccttgtcatgaggactagagtcacatagccacggtccccacaagctgactctgatgaaccaagctctcatgaccctgtgaaccacgtagcccgtgccctgctgttgacttcacccactgacattcactcacctcgtcccacacttcctcttccctcagtgggtgtgcagtgctcctctgactggttccctctctctgggcacaatactcaatatgctatttccggtgcccaggtagacccttcacctcagcccagctcacttttgtgccttggaatcttgcatatcctccaagtgccttcatgaatctaggctgggcagccactggcgttgagacagtgcagacctggtggctgggtgtagggcctccttcggctcttctgcagaccctctggtgactgtgacaaaaaacaccggaagcaacttaaggaaggaagggtttatttgagctcacagttccagggcgcattctgtcaaggtagggaaggcacggtggcaggaacatgaggtggctggtcacatcgcactcaaagtcgggaagctgcatgctggcgctcagctagctttctctttttccttcagtcctggggttaccctgatcaccttcagggagggtctccctcacgcctttaaacctttctagacacatcctcagagacacacccaaaggtgggtttccatggtgattctaaagccagtaaaactaacaaggaaggttaattagcatgcctccctccttccttcccaggaagaccctataatgccagggttgccctgacaaatatgtcctcctttggcacaggccctgtggcttggtggccggagagaccatttctgcccacaggacctggttgcagggagacttgctgtctgaggacaagcctatttgcgtcaggatcccagatcaaggacgactgtactttgccttagggagggcccttcccttgctcaggaagaaagtgggtggcctcagagggtgtgcagctggaggcagagaagggctgggctttgagcttggaagatgcagcacatcaaatggagacagtccacctgtctcatttggccctatcctggcgagagcagaggccaaggccaccctgcccaccatgaacttgggtaggcagggaagtcctctgattagagaaaggaggcagctgctccctcctggggccttcaatctcaggctctcacctgggcctgtgggggtggggactcgggaaagaggcaggtgacaatccccccaggagaggtgacagccccgaggtgggagccgcaccgccacctgagagtgggtgaggagcaggttagctgggtgaaaagttcgctgcgaggggagctgtctgtttccttttcttaatttatccactatttggctaacctcactctgaacccaggcccgagacccctcgactctctcccccgcctccccactgggctcctgggccgccactaaccctcagcctgcctgtggccaggcggggacactctggccttgaagcagcctggggcccacaggctgcctgggggagaggcctgctgcctggccaggagttatttatggccgaggtcttctccccatatttagtgaccaaaataaagttcagttgccacaaggtctggggccccaaaggccagacatccaccaagccatacaaggcatcccaccggttgccttcgtcaaatacacaatggcactggagacatgacctttccttcagagccatctgtcatcctgggttagggctgcagctgggcacatggacctggtgtcagacaggccctggggtagcttctgtgacttccgtctctccttgttgttcagagcaggccctgtagactcaactttatcccagtatctcttagtctctctcccttcccacccccccattttatctcctatttatataaatgtttgtattatttacagtgttttgtgagtgtgtgcatgctccagcatatatgtggaggtcagaggatgacttgtgggagctggttttctttccatcatgtgggatctggggattgaactcagatagtcggctttgataatgcatgcctcattctaaatcatcctgctggcccagcctttaatctcttaaacacatgaaaggagggacagtgcagtctgggcagtaatgaccctttccatacagactgtgacaggggacaggctggggagccaagacagcactgtaggtgccctcattattgacagaacagcccagatcactctgcccctgcagccagcgtggtcagccccgttactcactttccatgccagctcaccttggttgccagcttgacaccactgggaagagaaaacctctgtcgaagaccagcctccatcagattggcctctgccattttcttgactgtgaaaatctgggaaggcccagaccactgtggggcagtgccatcccccaggcagctgggcctgggctgtgtgaggaagggagcagtgttcctctgtggtcactgcttcagttcctgcttgagcccctgccctgcctccctcagcgatggacgggaacctggaatataagctgaatgaacctttccttcaaacattgatcttggtcatagtgcttttcacagtaatgagcaaacaaggtcattttcatactcccattgtgatctgtctggcagcttggacagtcacatattcccagcaagtggtagaataaaaatatgtaaagaatggattgtcctgtcctgtcacctccaggccttggaggcctttcctgaatgctcagctctgactttggggggcacaggtgcacgtggtcagggcataattgttacagtagtacttaggacctctcgggcatggggcacatccctctgtagccagtgagtgatataaagaatgttttgctatgcgtgtgtatggcatatatgtgtttgtatgcatatgtgtgaatgcatgtgtgtggaggccagaggtcaacactgggtgttgtcttagggtctctgttgctgtgaagagagcatggcaactcttgtcgggaacacatttaaatggggctggcttatagtttcagaggcttagtctatcatcgtggtggggaacacagggacacataggcagacatggtgcaggagaggtagtttagagttagttctatatctagattggcaggcagcaggaagagagtacaatactgggcctggcttgggcttctggaagcttcaaaggccacccccagtgatgcacttccttccacaaggccacacctcctaggagtgcactccttctgggcctaatggggaatattttcattcaaaccaccacaggtgtcgccctcaaccaccttattttttgaggcaggttctctcacctaacctggagtgtcttgtttcggctaggctggccagccagagagccccaggaatgcttcagtcccagcctccccagcactgggttgacagatgagcgtcactgctgctcagagatcctcatgctcatacgcaagggctttaccaatggagccatcgcctcagtctcccaaaatggttcttgagacaaggctggctttgaactcacgattgttccgtgggaactaaaggcatgcactcccgtgcctagacagtcatttttaatagctgcatgatattcctaatctgggtgaattgagatttcttcttgtttcctttgctctgaggtaggccacagggtaagtcctaagcacagggcttagtcagtgtcatgtgggtgactgccattcattcagatcatcgtgacaaatattcccagccctcaaagacttcttcccttccccctctagccataccaatccaaaagatggttaatcaccagacctgtttctaacttcctatgaattgaatcatggccaagagaagtctttcatctctggtttctccatagggatgtatagggcaggaacccatttgttttcagtgctgagcaatattccaccacaggaatcttaactagagcctgtctatactacaatagatggaaatgggcagagtttcctgtgcctccagcaacaaacaggatgttgcaacaactgtctttctgcaaacctctgcgtgtgctggaacttctgtctagagactccatatgtccatttgtgaacaagaataaaaggtttctttctactacacttgactcagagatgtttttttcttccattttcaaaaatttatggagccttcatgggtctgggtcgagtcagaaagggcctatcctatgggcagtggtgagccatggagggctctaagcggggagctgtgtgtttggatccgtattctggaaagaattaatgagatgcttggtgtcccaggtgaggcagaggactcagatgtagggaggactggatgatgtgttgggagggctagacactgtggggaggagctgaggggacttagtgagagattggccaagggcacagcttaggggacaagttcccacctcaccaaagcctttagtcacagcagggtggtccctcctcagaagccatgtggtaccaaagggaaggcagcctcagaggctcaagtctacagggacaaacactacttccttttcttgtggggtgtctgccttatggccactccctgaatcctgagttctctgtctgtcagacagggatctccaggtcaccaccaggagaggtaggaaagggaccccacaggaaggggtacatgcagcacaccaagggcctgggcatggccccattcgtgcctgcctagaagcagggcctgaagtgcctctaggggctgcgtctccacagcaggcatgaaccagccagcccggatcatcttccctggctctgggctgctgcctccctttagctacccagctgtgggatccttttcctcccttggccttgttcttacagcagacaagccggccacatccatgatgatggtatagagtggcctcatgcagtcccctctggttttagctatcacccagtcctgccccaggtcaccttcctcaattagttttgacatttcctcacagttagctttggaatccagcaggccttccttccactcagggcctgtggtggcccatgactcccagaagacactgcagaccccaaagagcctcttgccctgtaaggcaggacacttgctatcaaacaagggcaaatgcattagagcctgtgcagcctctactccgtctgaacaggagagaaagctgttcccagtgccaccagtggactggaggccacatggcagttgggagtgggtggtgagggagtccctctccctcttttcctcagggcagcggtgatgggctgacagacaggctgggtctgccgccaagcaccacactgccaactgcccaccaggatactaactggactgcctgtctttaggagcctgccaactgtctgtcgcctcgctagccaactgccagtcagaccaagtcctgggaactctggactgcatgtctggacctcagccaactgtcattcccaagccccaggggcaagtcaggggtcccaccactggtcatcctgatgacagctactgttcctgctacctagtctcttgtcacccgttccttggcaagcaactcaccatctccaactcttagtcttgcttcttggctgcaagagacagaacacaagactcaggctttgtccattcaagcatctgctgactgctatcattggtttatatgtagaccagggactcaacccaagaccgctgtaaccaatgagaattaagcctgtgtaactagcgtcttgcttttcctactgtccttgaacctgggagagtgtgaatgaggctggagctgaagcagccttcttgccatcatatagcgagaaggaggccagtccagagacatggaaatgaagaagacaaagaggctagtgtgtgtcaggtcctgggttcagccattccttaaacaagttaccattgggctttctggacctgtgaaccaataaaccctgcctgttgccaagcaggaatggctgtggatggtgccagcaatcacagggaatttttccactgtcaatggaggggcgctacctgctggccagggcaccagctcttgaatttctgcctgaaagggttaggcaagcctgactgggtttgcttaccctggctgtggtggctggtgtgtgggtacaagctggatgctgccttgttttggttcagaggcagagaattgaaattgggtccctctctgtggcttggtggcacctggaagtaccaggactcaaggtgacagcagctgcagtatctgccaagttctccaagctagttttgaactcttcatatccctcccagaagctgagatgtcattgctgtctattgctgaggacggggggggggggaggaggaagaaatggaaccattgccttgagtgagtgaggtggggactagggggtggttggcagactcccacctggttaccactgtccacaagcttgacatgcgtccctccggtgccactgcctcgtgtctgccatcccatgccggagctgggcagagtgctgggcacactgcaagggggtctgggagttgctgattggaacaatccgtataaagtatttgatttaaacaattttatttatgtcgcacatcccaattgccactctggagtccaaatgcctttggacttttgctttggctttctgctgggggtgggcaggcgagggtctagtccagcccgcccttctttgctgtgctaggccttgctgccctgctgcctgctctgtgtgggatgtcatgtgaagggaagccggcttggctgtccatccagatcagccaagccatttctgctgtgtgcccttgtgctatcttgctgagcgctgagctagcttcatagccagctagcccacgggagcctcctgtctccctcatcctgcctgcaactggccacggttgccgggattacaggccctggtccactcctggcttcacatgggcgctggggatttgaaactgggtcctcaggctttgcacagcaagtgctgtcagtgagccgtctgcctagttctagtccttaggtactagctttgtccctggcccttggggtgggaggacagaaggacagaaaaatgaggtggaagggggagagagagaaaatggaaggagtacactttacagcttcctgtagcggacaggcagggctgaggccggcacattctagtcatagaaagtccccgaagcccattggaagtcctcctgcttgtcctccatgctgcagctgggcagggttgtttcagattccagcagtgaaggcagtgagacatggctgagatacggtaggaagcgtcccggttgggccagataaaggtgttgatgattaacggcaagtaccaatgatattttttttattaaaaacaatcttattttacatgccagtcccagttccctctccctctcctcctcccttgcctcccaccaacccccattacaggccccccccccatccacttcccagggagggtgaggccttccttgaaggaatcatcaaagtctgtcacatcatttggggcagggcctaggccctcccccatgtatctagggtatctaggctgagagagtatccctctatagggaatgggctcccaaagtctgtgcactagggataaatactggtcccactgcaagagacctcatagactgccctggtctcccaactgacacgcacgttcagggagcctggtttggtcctattctggctccccagctgtcagactggggtccatgggttcccacttgctcaggtcagctgtttctgtgagtttccccagcacagttttgacccctttgctcatccctcctccctctctgcaactggattccaggagttaggctcagtgtttagctgtggatctctgcttctgtttccatcagctactggctgaaggcgctaggatggcatttaaggtagcccttcctctataatgagattgatgactaccaatgatctttacacaaatggcttcttcaaaaagacacaaggccgggattaaaagcaggatgctgtaattagactctggggttcaaatcccacctctaccatggcttaggctcctttccttgctaagcgtgtaatcctgggtctgtcccaccaggcacacagtgactcattactgttattacaaagtaaagaagatacacggtcattaatggatcttcactagtgcagagaatggtggttcattatttgcatttctcttttgattttttcctcggtaactgtggtagacagggccactggctctgtccttcagatgaggaaaccaaggttaggaaggtgacttcacttcaggttaatgtgaagagtctcagccaagtgtggacggcttcaaactccagacttgcccttgctcagcctccttctcaggctctcttcattcagcaacccacccagggcagccagcagggcagtaaggtctagcacagtgaagaggggtgggctgggctagaccctcgcctgcccaccccctgcaaaatgccacggcacttggactccagcatggagcagctcacaagcccagagcccggtcttcccgcctctcccagtctggggttttgcccagacccgagtcaccttcccaggcaggatccaattacagccgggcaacagcctgggatagagcacagcttgtgtcttcttcaactgcttatttcctttgtctgtgagccttgaaaaatgaaaggaatgataaggatttgggcgggggggggtatgctagtaaactctgcagatactgggtacctcaccaggagagaggcatggaggcnnnnnnnnnnnnnnnnnnnnnnnnnnnnnnnnnnnnnnnnnnnnnnnnnnnnnnnnnnnnnnnnnnnnnnnnnnnnnnnnnnnnnnnnnnnnnnnnnnnnagtcaccttcccaggcaggatccaattacagccgggcaacagcctgggatagagcacagcttgtgtcttcttcaactgcttatttcctttgtctgtgagccttgaaaaatgaaaggaatgataaggatttgggcgggggggggtatgctagtaaactctgcagatactgggtacctcaccaggagagaggcatggaggcctgagtagagagaccttggggggttacagatcccagcctggaacagagagaggctcatgctcctggatctgctggcctcctgggagtcaggccactaaagcttcctggacctcagtttccacaggcttgtgcaacagtcaatgctgactctgtcctttttattttattttgaggcagggcctcactgtataattctggttttcttggaactcactataaagatcaggctggcctgtaatttacagagatctgtctgcttctgcctcctgagtgctggggttaacgatgtgtgctaccatactcagcagcctcaaaggctactctcagtgtcactcctgcccctagtaaggacacgcctcctaatccttctctaacagttccactaaacaagcactcaaacatgtgagcctatgggggccgctctcattcaagccaccacactcccacagccctgagttgctacaaagaagaaataagatcaaatgctcccagcagggtgactcgactccttagaagacattccataaagtccaggggctgcttttgatcatcacaactgggaactcagctagtaggtgaagacaggggtaccgacatcgagcccaggacagcactgccagtgaccctgtccaccatgccaggaatgctgggataaagtattgaacatttagcaacacacagtgcttttcttgctcaggggctccatctggacagagaagggatagggtacactaggatgatggttaggcttccatattggcaaccattggtgaagagtttgtctgtgcagacagccaggttgtgccagatgctctgcctcacggagcgtctggtcttcaggaggcaagtacagcaagcagataccgtcctcaagcatccaaagttgtgatggacagagaaactgtggtctagtcatagaatgggagattttttggccaccatcaggaaggggaattgtctgacatcttcctgtcctgtttgcatttgtgtgtacatacatgggagccattctcttcctggccttattaactggctaagatatggaaagaggacgtcttgtcttgctcttaatttggggtgaatgatctcagttctccacttactataatgttaactacaggtttgttgtatgcagactttattctgaaaggttctcatgctatctgtcccttgtctcttttgacttttattgtgaagtgatattgaattttatcagatctttcagcatctattgagaaggtcgtgtaattttttgtcttgattctgtctacatactggtttttctctttgaaaagcctccatttttatttttatttaattaagtaaatatgtctatgtacatttgtaggcttgtgtatgtgagtccatgtgtccatggagaccagttctaaaaaatatatcacacaccattggatcacacagcttaacgagtttgactcttatcccaataaagctacatgatatgcactgaccagacaacttcctgggccaggacaagccaccagtgtgatggttgttctcactcgtcaacttgactccatctggaattaactaaaacccaagtggctgggtacatcttaattaaatcatttgaaatggaaagactcacttttaatctggattttttgaggagggaccacaccttctgttggcagcctatataaaggacatggaagaaggaatctctctctctctctctctctctctctctctctctctctctctctctctctcttcctgcttgccctcatccttgatggtatgatggtaagtccattcctttattggcattagaacctacttcatgattctggtgtatactgaagactagctgagacatccagcctcatggactgaacatctattggatgtttggacctcccattggttgacagccattgttggacaagctggaccacagcctgtatgtcactctaataaatcccatatatgtatgtgtatatacatgtgacatatgtatatattccatcataacacacacacacacacacataaacaattctgttcctctagagaatactgactaatagagcttttgctgccagtcattttggtatgatgtctctgtgtgggccccgaagttcaagctttctgtctaccctgggcattccccatctggagagcagcatcccagtagggtgatagctgtcactcccagctctgcctcctgaggggtcatcactgtttcttctcttcccaagccacggggagctgtgagtgtcaaagggcttctcggaaccaaggatggcaggcaggtcagcgtccactaggcactgaaggacttcagccctgctttccaggaagaaccttccatcccgctgaggtctccacaactgtcttccccaaggcctctcctcatccccatggtattgcccatgatgggatcttctgagcctcagcttatcacaccctagtcaaagccagccatgcctcaaaggatgtcaccaccagaggccaggacaaggcagtgagtgatccaggtagttcaaggggccatcaggtcatgtttggggctgtgagaaccacaagtgtcaagtcactgctttaacttcactgtgtctcctcctccccttcctcctcctcctccttctcctcctcctcttttttggttttttcaagacagggtttctctgtgtagctttggagcctatcctggcactcactctggagatgaggctggcctcgaactcacagatatctgcctgcctctgcctccaaagtgctgggattaaaggcgtgtgtcaccaccgcccggcccactgtgccttcttaagctcagtccacactggctagtcaccagcccagagacagaagcgcaggagagatggtattaaagaggaggggcctgaacccagatgggaccccaaaggtatggattccgtcctgtaatagtgaatggtaactgctaccaagacagaacctggagtcaccttggaggaagaggaaggcccctgagcatacctgtgggaaactttaatgtagaaagagccatcttaattgtgggcagggccactccctaggttggagattctggcctgtttgagacccggggtgagctgagccctagcatgcttgcagacatgatgtgaccagctatctcaagctctgacttccccagcatggcggactgtcccttgaactgtgagcccaagcaaacccttccttcctcaagtggcttttgtcagagtatcttatgagagcaatgggaaaggagaataagacaccctccatttcctcccatttcctgtagagccttctggcttcatgcttggccgtagaagactgggaaagttggggtgggcatctgagccctgactctgcttggagggctgggtgtgaaggccttagggactaagagctgaggctttgaacagatggggcacagtagcccttgagaatgtgagaaactgacttagtcccattctgtactgccctcccatgtagacacaggtgcagtcaggtgagttttctggaaaaagatgttttacactggtccgtttattgtgtgtgcacatgtgtgtgtgcatggggtccatgtggaggccagagaataatctgagggaattggttatctccttctactatgtggatctcaggggtctaactcatgtcatcagggtccacagtaagtgccctaattgctgagccatctctctggcacctaatcaatggtttctggttgtggttttgatacagggcctcctgtatcccaggctggctttaagctctttatgtggctgaggatagccttgaactttcgatcctcttgcccccatctctcaagtgctagaaataaaagcatgtaccaagcctgttttttgcggtattggggatcaagcccagggttagacaagatttcaccaactgaaccacactgcaagacccaaggaatgtttgggaacttagtaagacgtgtctgggaatagttccagcccttccttctgcgtcagcagatatttgtcgcctttttggctttgcctgaagcgaggggtgtgtgtgtagagaagtcctctgggctcttagttctgttccaaaccttgagaatcagaaagggtcccacatgggccacagtctcttctgtcttttcccagccacccagagctgttctttgaggacctcagctcctgggccttgtggcctgggttctttttgtcttccgttggataggaacatctcaaaggtaaaagctgcctctcttgggatggggctcttaggtaggaggggtaggggcctagtggtgactcctggagtcagctctggagctttccatcacctggtcccttgagacatcaacttgatcctgggagagtcagtttctcaaagtatttgttccccaggagctactggtgtccacaggactgaattcttgaccactggtccagccagacagcctgctttcctggaccagagccagtcagggctgaggtctgctgcctccctgggcttggcacccatccttgatatgcttctctttggggctggggaggaacccctagcctggcaactgggtcatttcccaggacccaaggtttctttgcaaggttggcacagcctgttacgcccctcagggggttggcgcttgtcactctccttcacttggacaagcaaaggaacagaattagctctccactctcactcttgaagctctccaggcagtcaaaccattccagtgagggaccagagaggtttcctgggaatatgcccaaggccttttccctggttcctctgggaatcgatccaaaagaaggagaagaagaagaaaaaagaccaaaagcggggtgctgttatgtgtatgtgttctgggagcatgaggctccatcctaccaccaagagaaaccatttgcattccgggaatcccagagatccccctgtaaccaaggctgtgatcatgcttggtggatcctggggagggctgtctgggtgtggctgatcccagcatcccaccatatctccctgggatcctcactgcatttctggtttaaagaggccaatggaacccccaatgatcaaagtgtctcctaaaggggcacataaacacatcagctgctcagacatggtcaggaaaattggggctcaacaatctagagccccccaccttgccccacctacttttctatgtccaccaagatggactccctacccccaccccagcctgtctcctggaagagtcagccataggcacctgccttggaaattgttcggacaccacagggggctgaggtgggtaataacatcccacgcagtggagacacctgtcctcaaggaccaaaaagatgatggatggtcctgactcaactccttgttgcttgctactgtctggtgccatggaaaaccaggagtcagagctgtgtttaattgtggacctggccgagtccacatcctactccgaattcatcttgtcatctgtgggacagggttccgaattctcccgttggaaggatgcttgggaagacagccaggcatctgcttttgcagggattgcccagtaccagtgggggctcctggccggcaccagcaggggctcctgggctgctacgtccttgagttggcttctctccatcctgggcttcaattctaactttaactcttcttccacggcttggcagaccacgtgacctctgtattcagcttcccgggatcttttagcaggtatgatcacatggccggatctggccagtgaaatgggagtggaagcaacacacaccatttcagggcagaacttgaagaaggcatgacggtggaccaatgtacatctcctccctgggacatctcatcttggctgcccagagtgagatggcttcatgaataaattgagatcatacggcagacaccttccccggtggaagccatggtgatctgggagtcacatctggctgacacccaccaccaagtggttaaactgttcaaagtggtcactctgagctctttttttttttttttttttgtcttcagtagctgcagggagagctggtaatggacacagtgcaaacactgtgcctcagactggctgtgccctatcaatgctccatagacaccagaacatctagtgtttctcttgcagaccagcctgccttcacttgggttatctcatcctctttactgtgagcatgtgggtccagcctgaggtgatcaggtctatgtggccttggtgaagctttcaaggaagccccattaagtcacttgggaccttctcctccccacccctgcctgcttcctgtcactcacctacatataaatggatgctattcctagagggtcacattgcccctcgctccacactgaccacagtgtcactgactcagttttctcagcgtgagagtcacaccagagaaccataggtgcctctactcttgtcagagaccatgccaactccttccattccctggactttcccctctcctacaatgggatgtgctgtggggtctgtggcagcccacagtgctggcctaagtgatgaatggccactgtcggctcaagattctttcttctccagatgaatggcatcttctgccagtatcatcttggcttcttcatgcgaggtagacagcaggtgctcagtaaaccctgcctttacttttaagttggtggcccagtggggtaaaggaaagacagacaggactctagttgtggtgagttcttctgtggactagctcttagggatcctagcagggaagccatgagtctggaggggcctccccgaccctctctcctggggctgggctgcagcccgtctcctactctctgtagactctgagatgaccctttccttctcaaaagatggggctgcctccctcccaggatgtgaacaaaggaagctgtgaaggccacctctttattcattactgccctttaaccagtttgcacgagctgagggtgagagggttggaggggaaggcggagtgtctgggggcagactctcctggaaatcacagatgcatactgctcaggcgggctagactggagaagcaatttaacaatgaaccctacagagtgagaaacgcacaaagtggtcaggtggctgccaaatggcatctcgcctccccatgggggtcagagtcacacacatcagtcttgcaaaggtcctggagttgacctaggagccgcagaatcttccccggggacaggaacagtcctgctcacccagcagatgggccaatgcacaggcacacgggtgtgtgcccaggtatcgtggctcctctcaggctccatggctcctcaggtgcctcttcctctatgtccttcccttaaaggtgttcatgcaggtatatgtccctgagaacctgtggatctcctccagtgcagcctgtgggagtatgctgaggggagatgggcagacggttagcagggtggtcaaaggtggtggggccagtgatggtaatgccaagcagggtatagacaaaggttttagaagctctcccgtctcctctgcaacccacaccccagctcccgacctccgagaaggaacactttcactaggtaaagggccgagcacaggaacaacagacaggctgtgcgctccggtgcgctttcaatgtgttccggcccttccaagatgcaagctgaaacttgactgtctttgtggtgagacagaggtggctgggtcatgaggggatccgcccagtcatggattaatggacagcctgagtgactctattattgaagccagctctctgggtatacttgctctgtcctttatggggaactctctgtcatgtcatgaggcagtaggaaggcccttgccaaatgctatgtcagtcatactcttgggtgtccccagcctctagaaccccaagatacatgcacttctgtttttttttttttttttgtcttgttttatttttagtaatgtggatgtctgtgcgtctgtttgtgcacgtgagtgcagttgctcactgagaccagaagagggcattagatccctgaaagttgtggttaacaggaggttgtgagctgccagatgcaggtgctgggaagtgaactctggaagagcaagggtttttaacctcttgccatctctccagtcctctttcaaagaaatctctctctctctctccctctctctctctctctctctctctctctctctctctctctctctctgtgtgtgtgtgtgtgctgtatacattcacctgctgcagtgcacatatgaaggtcagacatgggtaccagggatcaagttcacattctcatgctctcacagcaagtgcttttccatctgagccatccccagagttcaggagcttgacgcctgctcttctagaggatccctcaagcagtcagagagcatcttggactgaaggtcagggtatgctgggacagtgtgagtgctccaagtgctctctccccagctctccactctccaccctctgcttgcacggacactagcagagtggaagacaaagggctggttgccactgttcccttagtcacacatccaagggtggagtttttctgggagtcaacatttgatgataacaacagcctggaacaaggggctgcactccgtgaaaagcaggagccacagttatggctgcagggacacaggcctcccgctgtatggagagcacacagttacgtgcactgatagtcccttcagcatgaggcccagatgcaaggccttgctgtaccaagtctggacacttgtaggtgaattcagtgctgggaaaattctcgagaagaaagtatctacactaggaatcccacctccctaggtggtcttccctggtaaaccccaaccccctcgagctataacccatctccagattctgagccttaggcatgaaaacttctgccgccattagactgagctacctgggagctggagctattcctgacagtctgcagagcagtggttcttaacaatgtggtccaggaactcctgggagtgcctgagatctttccaggatacttatagtaacactgcagtgtggtttgtttttctccttcttccttcttttttttttcctttctctatttcttagcagtcttgtaaaaaaatatcacccaggctagcctcaaactatgcaggataacctcatacttctcatcctcctgcctctacctcccacacgctgggattataggcgggagctatcacacgtgcttcctgcagtgctgaggaccaatcccagggcatgctaggccagctctctacctatagagccacatccccagcccatggttcatcttttatccttttattttctctgcacgtgtggtagagtttcccaggggttctgctacaggggactaccccaactgactgaaataagaagcagatgtaagaatctagttgtttcagattaaaccagacaatggagagatctgcaggaacttaacccagcatctctcccggctacttgtctgtgtttttttaaaaagtagaattgcttattacaaaaatatatttatgagttgaggctagattgggatacctagtgatatcctatctaaaaaaaaaaaaaaaactaaaaaggcaaacaaacaaaacagtcatgataatagttctgttgctgccctctttagatgaaaaatattgtgaatagaaactaattcataaatctaacttcccctctcagtttttatttctaatgcagtaagcagtgatagataaaactcacacaagcaagagctgtttggatccctcaaacttataatcctcatacttataatcccagtactagagaaacaggagaattgccaagttcaaggccagcctaagttttatagtgtgttctagataagcctgagctacagtgagctctgcctcaaaaataaggaaaaaataaaaacaaacctcacagagagccttagaccaacaagtctgcgttactggtcagtacagtcagagagaggtgctactcctcaacctcctgctctgtgcagacatgactaatcaattttacattcactttctcctgcctgtcgccttttgtccactagggcccactggagtcaagtaaaaagttggacctgaacctgggtgaagaactctcccccgcccccataccttttcaagatgacgaggatattcatggtccatgggagcaggaggagggcctggttttgttgtacagcttccaccgtcctccgggctactgtctctggcttcagcggtgggaagaggttgggaaacctggaggcaggaaaatactggtttctcctggagaagttggcctttctgctgggcaccttggtgagtggctagtgtttctgagggcatcactttggctcttctgtgtgagggactcgaggctgtgggattctctcccagtccatgcctgttaagagttcctggatcctgccccaccacatgaatggagtctgcccaccagcagggggcatctctgacagaatcaaggaattagtttaccctgccagattcactctccaaagtcctgcagggctcctgggactcacattgaacaccctccacattttaaagcatgggccagccctcagctttcttactctgcaatctttcctcatcagccattcccatagactgctctcaggtctcctaggtcctcccctgagagactgctccgcctccctcaccgctgggtgacctctgatcttacctcttcctttctagttgccttaaccacaaccacaactgcatctagaatgaccttgcttgtcaggttgttccttgacaagggcctgtctcctccatcaggttatgagtcccctgagggtggaggcccagtgactctcactccctgttgcatcctcagcatctagtaggacctgatacacagcagaaactcaataaatactttgtcatctcgccccgctcctctactgggcctttctgattgggaggtcctcagtctgctggctccctagccggtcagtcaaacacaaagtggctttccatgggacttccagatgaacatgcagtcaaacaggggcttcccatgcctgttcagaggaatctgaccccagacctgtgcacccactgtgttccctaagtatcgggcccatgcacaaatattctctccaatttatggatacggaaaccatgaagcaggggcaaacctgtgagcccctggcactactccagtgactctgttctggctctttctgctttccccagtctgaaggtacagggcatgtgctgccggccctgacccctgtctctcaaaggccttatgagtcactgtggtaccagtaagattatgagtgatgagtcatcagccattcctgagcaaggggcggccttgggctcactgactgctgcctttcctatacctcctcagttatgtgacaaatgcaactttggtttgtttgtgtgtgtgcaaatgtgtgtttgtgcacaagtgtctatgtgtgtgcaggtacataatatgtccacgtgtggaaggcagaggtcagccgtcagtgtcattcctcaggatgtcattccactttgactttttacaacagggtctctcattggcctagagctccacgacttggctagcctgactggtcagcaaatccctagggctttgcctgtctctgcctccacagtgctggggtgcacactgtctttgcctggacttttataaacgtgggttctgaagatcaaactctgctgactaggttgtcttttccagaccaagatagtgactctcagatactgaacctgtagcctaggagggttggccttgggtttttcaaagtgacacgtgctgaggtagctcactgactgcaagtccagtggcatggtggcatatctgtaatccccagccttcacctgtgtccagcactgcttctagcagggaggagacaggacagcaagaaccagctataccggctttaggggacccttccaggtaagacccttgcagaaggacctgatggagaggcctcaaacctgttaaaatttcccccttcctctccatagtgggtaggatgacaacaaaggacactgggaagtgactagagaagcctgctcagctggcccaattctagctgtgttgtctcatatagacactcatacagttcctctatctgtgaaatgggtttatagctcatttgccaggctgctgggagggccaaagacaacaactgtgtattggaaaggaagtgtctagtgtggctggaatacagaataagtcagtaaaagagaacggtggcaccctcggacacagccagtcttgctggatgtccacctgtcggtcctaacctgatcaccagggaaattgctaagatggctgcagagcaaaaccaaggcttttctttcttcctttttctttcaataaataggagctggttaagcatagctcttctggtcaagcccttggctctcacctgcacagctataggtagctggcatccactcagggctcacaaagcagtcatagccagtcaattcccacacaggttctcccccaacttgtgaagtagaaggtgctattagcaatcacttttaaatatataaacagggaaactgaggcacagaaaagtcaagtcacctgctggaggctacacagaactaggatttgatcccaggacatctggatagtcttgagtataacctccttgaaattgagaatgtatgatagtttgttagtaagtcaggtagaaatatctgcttctggataaactctaaagagactgtcttctaggaaaactcattaagaccatatttattcttggtagaaaataacagccaggagtagtggtgcactgttctaacgccaaacactcaaggggctgaggccagagatcaccatgaatagaaggccaccctgggttacagatgagatcctgtctcaaaaaaaataaaataaaataaaataaaaaaaataaaacaacaggggaagcgtctctgttatgagcaatttgtgtgccctagggtttgtactcggtatgctgcattcattattagtcctcattttacctgcaatctatctggtaaataccattcctatccattttatggatgagcaaagcacaactccaagaagtaaacaaatgttcccttaaattgggtgtgtaatgtgtcgtgacacgtgttccccatcaatgccatttattgcttgtgattttataaactggcagtgaagcttggcatcacacagcacatgacagccataggaagatgccaccccaggtcttggcattcaaacctgaacattaagccgaggtcacattcttctacacaagatgggtctgtaagtagcttgagtagtggactttggggtttcttcacatgggggctataatttgtatttattaatttaaaaaatacttgtgtgtgtgtgtttgtgcctatgtgtgatgtgtgcgtgtgtacacactgtgtgcccatgtgtcacagaacgcctgtggcagtcagaggacagcttgctggagtcagttttctccttcccccatgtggggcccatggatcacacgcagactgtcaggcttggtagacagcacctttacccactgagcctcctcaccagtcctggctctataaaaggttcacaccttcagcaaacagctcaattagctttcacttgtttagccaacaccactacgaagtttcctggggctccctcccaggctctataccattgatcctgtctccagcaccatagttttgcctggctctgaatgccgtgtacttgggaccgtgcggaacgtgctagtgtggcttctttcgctcagcaccatggacgtgagcttcatcacacaggtcccacatgactcacttcctttctttgttgttaggtagtattccaccgtgcacatccagcactggtgttctgtgtaagctcctgcagtgaaaagcagggtcctaagtgtgggcagtcgctcttggaccgagcaaaatggagactgagctgggcaccagctttgcctctctctgcttccttatagtggatgcgatgggaccagctgcctcatgctcctgccactgtgaattcctaccaggacagactgtacccttttactgtgaacctcaaaaagccttgcctttcttaaagctggagaagtaactgatacagtgcagtaatagcctgttgccccgtgagtggaaaatgatgtctgagagtgtcaccaaggccaagggattctgaggctcttcctgtaaagctgggctggctcaggagaggtggctggtgtcacccactgacctgactcgcatgccctggaacatctcagtgctggtgtgaaagggcagcacggtggtggcactgacaccaggacagtccagcagccccaaggtcaggctctccatgaaggcgaaggcggatgctttcgatgtgcagtagtcgatggctccagggatggccgacagtgcaagcacagaattgaggcacacgatatggccgttctgcagctccagcatgcgtggcaagaaggccttggtggtctgagggtgggtaacagaggtcaatgtggagcagtgcggctcctgccaagccctgcacccctgcactggggagaacagcccactctagatgcatagctaccctagtgacttagccttacagtatggaggggctgaggcttccctgctacagagcactacgttaaccagtcagaagttccagtgtctccccgtcagtcaaaagttcctatgtctccccgtcagtcagaagttcctatgtctccctccagtcagaagttcctgtgtctccctccactcagaagttcctgtgtctccctccagtcagaagttcctgtgtctccctccagtcagaagttcctgtgtctccctccagtcagaagttcctgtgtctccctccactcagaagttcctatgtctccctccagtcagaagttcctatgtctcccgccagtcagaagttcccatgtctccccgacagtcagaagttcctgtgtctccctccagtcagaagttcctatgtctccctccagtcagaagttcctgtgtctccctccagtcagaagttcctgtgtctccctccagtcagaagttcctatgtctccctccagtcagaagttcctgagtcttcctccagtcagaagttcctgtgtctccctccagtcagaagttcctgtgtctccctgtcagtcggaagttcctatgtctcccttttatctagccattttgccttggaacatccctactagtgtgagccctggtcccagtgtacttctcttttccctcaccccacccaggcttcctgtcatacctatggctggctctgggccaggaaagcccttacccagaattggcccagggtattgacgtgctgggacttgaggagagcatcatcatcactgtccatcaagctctttccatggaccacagcagcgttgttcaccaggatggtgatgtcacccacctgtgggcaagagggggctgtggagccgtgagggcagccagtccctatgggctgtacctgtaggggcacagaccaggctccgcaaccaccagccacatggcctttctgagcatcagtcttgtttataaatggcgctggtgccataccagctgtgtctgaggattagaaataatttatggtacatactatacccagaacgtagcatatttataataaatgaggttatgggcacataaaaatggtaaatgtcactatgcatggggtatgtaacaaggtgaattcttttctttcttggtgctcactgatttacccagcccaaatgtcttagattagggaaaggattttcccagaaggcaatgagacatttgtctttgagagaaactcatagggtctaaatgtctaaaggactatagaggtctactcttattgtgttatcagccccagtccctgccctagtaacttggacatgcttcatggagagtccccaaaggtgacctgtacaaagccagtctaccatagcaacactccctcccaggccacatgaattcagtatgctggggctagatgtgtccaggctactgaccttttcacggacagctttggccatctggtatacctcttcccggttgcccacatcacagatgaagtagtggcactctgtgcccatctgccgaatctcctctgttgtctctttcaggcatttctcagtgcggccccagaggacaatctggaaggaaagaaaaccagcatggaaccagtggctctgaaacgggctgtatcagtgtaatgactgctaccaggagttttagtgggctttaaaatgctggcttcctcggttccatcccaaaataaagtaactaaaacaaatcaactgtgagctataaataaaacattagttattattgtgtgtgtgtgtgtgggggggtgtaccacagagcatgcctgtgcatgggtggagatgagagggcaacttttaagagctgatttgttccttctgctgtgggtttgcggatcaaacttgggttgttaggactgtggttacctgctaagccatcttgctagctgtcttagttagggtttctattgctgtaatgaaacactgtgactaaaagcaacttaaagggtttattcagcttacacttgcaagtaactaacagtctattactgagggaagtcaggacaggaacttactcagggcagggatctggaagcaggagctgatgcagaggctatagggaggtgctgcttactggcttgctcagcctgctttcttacagaactctgaaccaccagctatctcaggggtggcataacccacaatgggcttggcactcccccatcaatcactaatttaaaaaaaatgttctacaggcttgtctacagaccaagtttatgaaggcattttctcaattggggtttcctccactcagatgactctagcatgtgtcaagctgacataaaattagccatcacagtggccaacaatgaggattttttttttcaatttttacttttattgtcagtgtgagtgtgtgcgtacatgggcacgtgcctgtatgtgggtatgtgtacaatgagtgcaggatcgaacagagatcagaagagggcatcagatcccttggagctcaagctacagattgcccagaacttaggtcctctggaagagcagcaaattctcttaatcactgagccatctctgggctctaacaagattataaaagggacatcaccgactcttaaatgagccagcggttttggagcacacttatggccagtcagctggtatgttagttcaagtctttctgatctattcttcctagcagggcacctcttgccagcccagttatagccttctccatgattcttagaagcaacaggaaagctttttggacactattctggaattctgttaggaaccagctggccttctcaccaattatgtttaaagctgggattattcccgccagccactaggaaggatgaggtcacattcttcttcttcatggccttgggggcttccagctcactgtggtcacactgggaaggatgtaaggagggacaggggagggacagtgagactcctgctgagaagcaggggctcccttactcaacaggtaataagtaggagtgacccagtgactttgagaggacctgtgagtgggtgcttagaggggttgggcaggtgtattactggtctacaggatgctaggcattgaagcctggctggtccttagccttaacctgaaggaggacaatacatctccccattccaaagagtccgagtttgggtgcctggggacctagctgccctgagatacagctttatggtacagaggtagaactagggaaccacagcatccaagaacatcagggctccagcaagggtctgcattcctttctttctttttttaagatttaaaaaaattcttactttgtgtatgtgtctgatgtatgtatgtgcacctcatgcaagccagtgcctgtgtaggctggaagaacacatgatcccctctgtaactaggtataggtgattgtaaagctccatataggtgctgggaactgaacctgggtcttctgcaagagcagccaattctcttaaccgctgactcatctctccagcctcagatctacttttcttttctctttaaaatcatcaacgaggggcttgatatcactgtgaacccctgtggctttcttagcacaaataggtgtgcagaagcttccatcaaaaggagcccgggtgatccatggtctcgatgtttctgggtcagggtttaaggcttgccatgctctgctcagaatatttgcaatcaggaactggggagagcagccctgtccactgggctgggagacagccccagaaagggggataacggtggtcaggcaggtgagatgaaggcctgtgtgcaccgtctcttgtgagtaggtgaagaccacaatcagaaccctggtcctcttgaagtcaccccttatgtaccagcagagtggctctttctctctccctagtaccaggctacgtgtctctgtgaacctggagtccctaggacctaattctgttctatttatcttaagatctcaatgcctgccaaagcacatgtctgttggatgagtgaatacatgtgaagggccaaaattggggcagtacgggtgggtgtttaacttcctctaaagactgaaagattacccatcctctctgtgcctgagctaattgcagacctagaaccttccatatatgggtctgtgtggaccaggagacagtgggatctggggtttcccagagcacctaccctaaaaggctgagctgaggggaggcttgctggggctggagtgtacaggaaaggagctagccatggtgctgggcaaaggtgagctccaggggacaggtgcatctctctgtcaggtgtgtgtctgtgtctgagtgctagtacctccaggcccatctgagtgtgcacctgggtgtctgtaagtgcaagtatgcatttgtgtgtctatgaatgtattcatatccatgagttcacagctgtggatgtctgtgggtcagtgagcatgctctgtgggtatggatctgtgagcctgggcctatgagcctgcatctgtgaacaggtctgaacataggtgtgcttctgtgaatgtgtgcaatcctgtgtgcttctgtccccaggtcctctggtggacacacataggtcttcggataggacaccctatgtccatctgtccttatgaaccagccctcatctctgtggtgattgcggctccaatgcggtatgggagagggcttgaaggcacatgactacctgggtgaagctgctctagcgacaggcttctcctggagtcctgctggctctcagggaatctgtgtccctgtgaggtgccctgcatacaggatgtctgccccagtggctctgcctcagtcctctgggtaaccacaagtgttgacaggtcctgtccaagaccagatgcgagacaaaggtgtcagggagaggtgaggtttgagggagagtgggtagggccctgggggaggaacagtcctggaaagaggtccagtctcctctcaatcccctggctgaccagctggcagggtcaggctagcctaagcttatgaagtcaggactgggttctctacatctcttggcctccagtcttctgtgaggtgagacagtggttctttttgtccccttcccactgcaggtgagcaggaggaggagagaaagggccttggccccgggtgtggactgtcagcgagggcctgccctgttttgccttactggcatctgctggtctcagcagcagaagcccttctcatctcttggttagagacttccatcagccactttctgtcctggggacctgaggcttaatgaattacatcaggtgtccaaagccacacctggtgggagatggaggtgggatcttaacccagcgtctgctctctgctggtacagccttgaggcgtggcagcatgggttaagcagttcccacctcaggagtccatcccagtaaggaaggctgagggatcgaggaagtgtcactcacaagtgagggtaagagggtaaagaataagcaaaggtacctaggggatctgggagctagccatactgtgactattcatagaagagggagctgtagctcacagaggctaagcaccttgtctgaggccatacactgagtgacagagctcacatttgagcatcagtattgtctggctgcaagcacgggcggccagtgacaactgctattctccatcctaagttcaattccccagtactactgaaatgaaagaccaaaaccaaaaccactgtgtatgtcccctcccaaggccccaagggggctcagggtgcccactgaatatcttgcaggctcactctgctgggatttcactggggaggaagggcaggcaaaccacacatcacccttgacacactctatagtcactcgagaaactggtatgttatggccaggaaagaagttcagggttcagggcacaaacaaaaggggagcagcaaggaataacccagaaaagcccactcctgacacctcagcaggtcaaggagcaagtgactttggggggaccccagagggaagggtcgtgcttggttgctactcagttcttgacatctgtttatggggaaaatcgctaacgaactaaggtgacttccgatcttagaaaccagaggctggtgagagggctcagctggtaaaggtgctggccaccaagtctgacaacctgagttcgatctcgaggactcacatggtggaagcagacaacggactccttcaagttgtcctttgacttcctaacatggtctgtgtcaccctcccccctaccccacgtaaaaatcaacaacaacaacaacaacaaaaatccagaagttaggtgtgatggtacacacctgtaatcccagttcaaggccaacctgggctacacagtaggaccctgtctcaaagcaacacaggtaacaataagaacagaagcaaaacggaagatgtaacataaacttccccacggcaactcagcatcagtaacccctgcctagcctcagccctaccaatacctgtccagggcctccactcagggcctccaaaatggcttatttgtcgtctctcaccattattctttaaaacaggaaggctctttgcaaactcctattcatcctgcagagcacggtctgaatgtccccttcagttccaaagcctctctggctgtcccttccacccttcctacaacactggccaatggctaatattagagtcctcgccatgggtcaggccctgcaccgagcatatggattggcctcttccattcttacaccttgtgggtggatatgctactccccacagtatgagagtctcaggcagatagacttgcctagacgctcctgtctacacagccatatgactcagaacccctgctcctccctactaaggctagcccttgttttgtgtttccgctggcagatagaagagtttgtcgaccatttggaagccctttgccttggctcagatccctcagggactcttattcatcttgtgaatcctgcaccagccaggctcagctgccccagtcacatggcactggtccatctagaaatccgctgaacctagggcactggtaacccttcctactcagccttgcctttccgaccaggggggatatcctagagatgggctgtgtgtgtggtgggggtggggtgggtcatgtaagcaggcccttgggcagtgacttcagggcccatgggccctgtggcttagagtcagactggtaatgttggctgtgcagacagaaggaaaatgcccaacagagactccaaggatggtgggcagggcagcagactgggtgagggaggttcagaacgggtgcggcttgcctccactcaaagcagagcagacaggcggtaggaggacgcttattaagagacatgctaatgtctggatgagcatgagcacaggagtttcagtctatcctacagtcaaagctagggcggtcctgaatagaaggagatgggcgcagctctgggggagtgcctgtagtttctgagacatggacacggtactttgtatttattttttgtggtaccagggattgaactctagattctgcacatgctaagtaagcattctaccagtgagctataatcctccaagccccaccacttttcaaaaaaacattttactttgagacagggtcaaatgttggccaggctgaccttgagttgactctatagcccaggcaggccttgaccatgtgactcttctatgtcagccttctaggtagcttgtgttacaggcctggaaacagagcacactctcaaagctaaagatgcgaggtgcagtggcacatacctgtaataggatcaacggaggctgaggcagaaggaccatgagttcatggctgcccgtctcaaaaataccctttacattcctgggtattttcttttctttttttttttttctgattgggtctcatacagcctaggttgtccttgaactctaggtgactgagggtgatcttgaattccagctcttcctgtctgcacctcccaggttctgagataacaggtgtgtgtcaccacatctggctacctactttgtttttgtttttgtttgtttgtttgtttgtttttttgagacagggtttcatgtatcccatccaggcctcagatccagtatggagctgagggtgaccttgaacttctgatcctcctgcttccatcccccttgtgccaggattacaggcatgtgtcagcatgctggttttatgcagtactggggaaccaaaccctgggcttcatgcagcctaggcaggccctcaaccaactgaactacaccccatactcaatccaaaggtatttctaaagagaggaaaccctcccctgaacacagtggaacctagctctggagccagtctgggttaagtccctctgctctgtcaccgtgagcttggggtccctaggaacctctatgagttgaagtttgagtgcctgcttggaagtgaagcaggatcaccagggagctcattttggaccagctggggttattatcaacaacacgacagccatagagccctctttttgtagatttgccaggcccacaaatggaggtgttgaggatgacggtgacccaaagcccccacccggggcactctggtttgcttcccttagacacagccttgctcgggtcagaactccagaaccttagtggtctctgtctcatttcccctgacttgaaagacatccttcagctacagccacaggccaggcaggcagagaccagggtccaaactgcccatctgcaggatcagctgcaggaccttggtgggcagatttccctaggaggctaggtttttaagctggactctgggagtttctgggagttctagggaggagactctggggctgttaagagggaggagtctttgaaagacatgttctgcctgcctcaggtatccacagtagtgtctgtcacttaaattcagcttccagaactgttgtctctacaaagactggttcaaacaacaacaggcttgacactccagcacccaactggctgttaggaggcccttttcctagtgacaagccctaggtggctgccccattttcatccactgccagcgctgtcccgtcaccctggttaggacaagaggcccccttctttccaaaaacaaccattcaaagtgatgaccacaaacctgctgagtgccacctccccagtcactccccaaggctacctgatccagtccacactcagaggacaggcctggaggagcagctactacattcagcatactgtgaccatcttctcagcgccaccatggacagctctggttctgcagggtgtgtgtgtgtgtgtgtgagagagagagagagagagagagagacgtggctatcttcctccaatgccctccaaccccccgtgacaaagggctctcacagaatctgtacctcatcgatttcagaaacactacctggccagcaaaccccagagatcatatctctctatgtccccaggactagggttccagatttgcgatgctgggcctagctttttacccaggttccagggatttgagctcataaccttatggaaacacagtccaaaacatcagcattttgctgatggagccatctcctaggtggtaggatcttttatgagaagggccatctgtttctgtttgctatgttagtgacaataatagcagtatgtatttgacaatactaatggtctcaggtttattaggaattccatggccaactccaggccagaggtgacaaagcctacctacaagtccctcatggcaacctggaactgggcagtgacttccttcaggccaggtgccactatcccggagcttggcccttcaaggagtcagcataatgaccaagagctctgacatgtgtcctgtggctctgataactctaggaaagggtccacagacattgccacatgaggaaactgagccacagaggggaaggctcacacaatttactcatactcgacctgattctcaaacctgtgtccttggccactaactgccttggagaacaaagggatccttatgcctgctcactgcacagctatcactaagcaacgtgtccgggtattacagcacccacgtgcctgtctggatggcctcccaggggaggagggccagcatggacctgaatgtgtgtggctcctgcccccgctggccaggtgactactgagtgggcaagagtgataatcctcacctgctgtgaagatgcccgggtcctgcaggctggaccaaaagggtcagcaagtcatgtgctcctattggtggtagcataggaaaagcaagtaggaagaaggatggcaccagccagggccatctgtgatcctcacgtgagtgggagggaggcgacaagccactgcttcttgggttcttgttttgtgcatgctcctatcttaggaaccttagattaaatcctcacaacagcccaggaactggatgagtgggagggtgtgcgacctcatggactcatgtccaagtcctgacagccagtgcttgcaactgtggccttctttgcagatacagcccagtcaaggcccccaaggagacactattatgaaccagggtggatcccaagtccttattagagatgaaagggttaaacagaggaatctgttgggggagtagggcccagaactgtgacagaatatatctgttttgttttttttttggttttttttttgtctgttttatttattttccctgagacaaggtcttactctgtagctcaggctggccttaaacttggcaatccacctgcctcagcttgtgccaccacaccaggctaagacctgtagctatatgttacttagctggtgatctcttcttgtggctgccataggtgggtcctgctatccccattcaatagacaagccccagagaccccgtgtgacactgaggcgggaaagccacggagcctgtggtctcagtctccagaccactcggccaccctgctgtttgtagatgcctcctccatccttcccagagatgcctcctgctgccagtaggttcttttctctcactctgcacccagccctcccatccatgccatccatgtgtagccgcctctagccttgccagtgtatttgtgttagtggccacacccctttgggcgggacttcaggtgcggaaggcagggtagcacagggtagcgggaccctctctctcagctctgtctattgggctgtggattggatctgaaggacagagaaaggctgcggcattcacccatttatcgtttatcttgggtctagtgaactcattacaaccccaccttcatccatgccctgaattcagctcctctaggcccagctgccccctcttctcaagcagaccgtggccatggccccaatggatcctctcccactttgcctctgcttcaggtcagacagagatctttctagaatagaagcaggactttgccactggattccatagctcattaagcaaaattttgcaatggctgagtttgctatttgccaaccctctcaggacgtattagcttccacttgagcaatcatttggtccccttctgcctacctcaatgtggcttttggctctctgtccttgaagggcatcctgcctcctcatgactgctccagcgtatacccacgaggccttcagggagtcagcaccaactgaccaacacttgctctaacacccaatccctgccttatttaccgactcctgtcttctctttgagacagacactcctatctctccacaatggatctctctagggaccctaaaactgctacctgccaagaggcggtgtttagccttgctcagaatcaagtgagacctgaccgggggggggggggtgtctccccacttccaaccccacccctactctggtgcgattcttacattgtttctgagtcagctgctctctctagctcaaacaagggcccttgcttctttccataaatatcagttaccaccacagacagcaaagggcaagccgcaaagggcaagacacaggctacagttcctggctgaagtcctgtgacccctgtttcagttcctccagttggaccttgtggaacagaaggccagtgtgtcttaaagtgcttgccaggtaagaatgaagaccagattttggatccccggagtcacatggggaccaccctcttatcccagcacgggaggcagagactgagccccagaagtacattgtctgtgagactagcccaaacagcaaacccagggttcagtgagagaccccgcttcaatacataagtgggagagtgatgcacacaggcacacgctcgctcacacaggcgagcatgccgacacacatgcatgaatgtgtactacaaccctctcaaaacaaaacagaagctccagatgaccatgcaaagaaggggcggctggaagtgtcccaagagaaacacagagcctcccaggatggagaaagatggtggctaggagtggcactggagtgggcaggctgctggaataaggtaatatttcagtggagacctaaggggactcgaaggagggagccaggcagatgtatggggtgggggaggggtgggcaaacagagcagctaaatgctcgcatgcacaggcccaagtgggaaggggtgtgatgcccagtgtgtcagagctgaacagcagcagatgccaaccagaggacaatgaattctactttgagtgcgatagtgtggggtttgggggtggttgaacaaacagggacatgacggcctctggtttggatgttggaacaagtttggagtcccagaaggggaattgaggacccaggtcgggtagaactagtggggactgtggtacattcaggtgatggggcgcttgggaaggagtggaggagaagaggggtctaggaggcttgcagggctggctgtaggctgtcaggagaaggcacagaaagaaagctgccatccgtgagttggggggagaacagaagagagcaagataagagataatataatagagggagacattttaggtttacagagaaatcaggcactagggaaatgtctggagagctacaaagatgacaccaactaacaatctaagcaacagaggagaggctaccttaaatgccctcccctgataatgagattgatgactaattcatatgccatcatatagtcttcatccagcagcaggtggaagtagaagcagacacccacagctaaaccttgaactgaactgaaatccagttgcagagaaggaggcgtgatgagcaaaggggtccagaccaggctggtgaaacccacagaaacggctgacctgaacaagggagagctcttggtctccagactgagagctgggaaaccagtatgggactgatccagatcccctgaatgtgggtgtcaatgaggagacctcggaaatctatggggcctcttatagtgaatcagtacttatccctagcataggaatggactttgggagcccatcccacatggagggatactccctgagcctagacacaagggggttggcctgggccctatcccaaagaatatgacagactttgaagacccccctctagaaggcctcaccctccctggggagcagaaagggtatgggataggtagggtgttagttgggggggggcaggggaggaggagagaagagggacctgggattgacatgtaaaataattttctaataaaaaaataaaaaaaaagctgccatccagagccccaggcctcttgcactcaggaaagtgggctttgttaggtctgggtatctgggaaaagaaagatcttgaccaagtcagttcccaggctccttcagtttctgaaagcccagcactggtgaagcagaagggagggaggtgctggccagctacccatttaggttgtaaacacagattcaaataatagagtggcccctgtccccggtgcctgacaatgaccacgctgctgctacggctctgtgtgctctatgtggatggagcaaggctggccagcaggctcacatgacagaggcagtggccacgcacagctcacagaccactgggctgacaggaggctccaggaagtttttctgtgagcaggggtgggggtgtgctggtgaaggaggagcagatgcagggcgggagctggactgattggtgagggagggattagggtcccaggctgggtggggagaggagggacagggatacaatggcttagtagaaacctggggttggagtccaaagtgcagatagaggtgaggtgggggatcctggctgaatataaggtcagggctgaggagtagggagctggtgtcgggatcgtgggagcatgtgggaataaagtaaggtgtgaacaggacgctggggttaggatcctgggctcaagcaggggtggggtggtagaggggtaaggggcctgggggggtcctgagtggaggcacaggaggggtaggaggtgagtaggggactggggtggagtctcaagtcacataggaagaaaggggagacaggaaaggggtgctgggctcagatggcaaggggttagaaaaggggtacagcccttggcccctcagacctcgggttcttcctctatgacccatctggcagtaagcaaacacactgaggccgtgggtgctgctgactggcagctgaacccagagctgcatatgggctgcaaggtgccaagcagcctcaggccacatggcctgttagagacacgcaggcttgctccagccacatgtttgctccttgctcttgagagagggcagcccagctgatgctgcaaaagccaccagacattgcaacacacagccagcctgctggccgctggatgaaccatgcgccacccacccacctcagccaccggcacccacccagctggagggcttgcctcctatggagcacctccaggactggcagcttccaccacagttggatgcagtcagtttcctctgtagggatgcaggggaatcccggaccggcacctccctcaagggacctccaaactcggggggcagggtttgggtctgctctggtctttgtccagtgggttggtaagtgtctgctgtggctctcggtgtccacagtgactctggactttacaaaagttcatggagacaggcggagtattctccaggaataacgatacgccaaaagggatggtgtctgctgtcccctgccagactgcttagtgcagaggtctccctggctgcagcttcttggccatgctgcccttggggtgggaagctgtctggtcagggcccccaggaatctacttaggagtggatttgctatgtggctggatgggtcacttggggtctctggactccaccatttccagctggcttttttgtactggggaaggtcaaaagtgcaagaaaatgctctctggagaaggcaggctgctaagtagccagagaggctggacctgcctggggacaacctggagccacagagagcccagggcattatggccctcaaacttggcttctagtttacaaggagaagtggggttttggcctctcagagataagcagttctctgggcctcaggaactgacttcccttacactgacttccctggtgggtaacggaactcacatctgccttgtggagggcagagagccttggagtgacgccaggtccttgggggtaggggtgggggcagaggttggcactggaatgtgttctgtggttctccagcttatttatttatttatttatttatttatttattattttttttatgagacaaagtcttgtcactgaacatggatgtcacagttctggctaggctggctggccatcaggatcctgggatccccctgtctcttcccagtactggggttacatgtgccctcagcatccatggcttttacatgggtgtctgaacccaaagtccttatgcttgcacagcaagcactgcgtccaccaggctatcccccagtcccacaaaccccaataacgatcaccgatcacccctggaatatggcgaggcacagtcttctcttctggttgacatggtctttgcatccctccccttcaaatgtccagctctattgtctttctaacacctggtcactatgtggaatgacaacagttaggaagtgctggcccctcccccaccccctgcagagaattcaggcgttttgggtcatagggcacctggtgagcatatgagtgatggatgacatcatgttgccatttttgtcagcaatgataaagctgctgattaccactaggagcagccacaaaatgagaaggcctttggccaaaccatcatgaagaatttaaccatggagacctggagagggaaaccaagtggagggctgagtgggatggcctgtcacacccagggagccaacctagctctcacaggggccatgtgtcaacaatactcaatgctgtgggtgacccatgagccttccgcccatcctggggagcaggaaacacagatctgccactcaaatctaagatgcaggctgggggatgggtcagagaataagggcacacatacacataaaatatccttttagatttgtttttattttatgtgcatgagtagtgtgtgtgtgtgtgtgtgtgtgtgtgtgtgtgtgtgcatgtctggtgccagaagactctaaaatcacgtgggtgctgggaactgaacctgggccctctgcaagagcagcaagcattccaaaccactgagccttccatcgtaatttctcaaagaaattagtattattgtgtgtatgtgtggatagtgtgtgtaggggcatgtgtgctgtccatgtgtggaaggcagaggacagctttgtggaactggttctctcctaccttgatgcgggttctggggattgaactcaggtcaccaagttcatgcatcagttgtctttatctgttgagaatcccgctggctctgaatcactttagatatgggcgccaagaccctagaggcatgcctattgagattacaccctggatgtgggtgagttgccctggccccggcaggtggcacagcagaggtaagaactcagctgcagtttagaaagatgaattcccctatggccactcctcctctcctcagcgtggtgtaattcagaggtcacaaaacatgtctggtaacacaccagggctgctggttcccagggaggcttagctcgttaagcactttattgaccgacttccaaagggaaaccttaaagaggcggtgtgcaggttgtttgctgggagccatttaatctctgagaggacgcaggacacatgccatggagttgaccttccagttgtctgctggtgggctgtcagagtggggacctgggcatgcagggctggggaatgcgacaggaagtggtgcagcgcagcaggaagtggctgggtcagcgcatcctgcaggaagcaggatggtgggagcacagctgtcaggaagggcagggcttttctgggggaccagccctacacaagtacccttccactgaaggcgctgcaatccctccactttcagagaatgctggtgggaagatcagactcccttcaccatcctttagcctgttgtcatgcatttctgcaggaagccttccatggctccctggtgttttcccagtcaagtccaaactccatgtacagccactagatgagtggttcagtccctgcctttcctcgccttcccctggcacttctgttctggccagcccatcccctcctgtgtgttctttcccagacacgtttccttctgctgctgtatctaactcttccgtttgtcccacttggactcaggaaagtattttctgaacagtggggtcaaagatggcagccaccttccggcaccaccagagcccccatggcactaaggtgtcacacaggcagcagagcaagatgcttggtcctttccacacttgagtggcgccccccaccccaccccccagtgtcctcagagagtcccaggtgtccttccttccagtctatggctcagcaggacacagttaacacccacttctccagtgagtccacaacatggccctgcttgtaaggattcaggcatcgtgctggcctgcccctgtcacctggcagaatgcactcaggcagtaccctggtcagcccagggctccatagttgcacagtctgcacaggtgcaaaggacccctttaaaagaaagacccccccacccacttacattctcttttccagctctccttccctcttcccccaccttctctttgccactctctgtctctgtgtctctatctccccggcttccctttctaagctctgtctgcctggcgtgtttgtccctccgccttgggcaacctcacctgccgtggaatctgcccaggtcccccacgcaaggtccccctcaagcttgatcataacactgctgcctgctgggactgtgaactcttctggccctagagactctgtgtgtggcttctggaacagattcagagtgagagacaagggggccggatagacagcccaagctttaggcagctctcccaaagtcattgggaggctggagcaagcacaccatttcacagataagaacactaagacctgctcagggactggggagtgactcacaggatatcaggccccaatggggtcacctcagaacatgctgctttccttgggaaaggggtgaagtgaagaagcctgggggaagtgaacgtgtggaccctttggttttcagatggactgtcctggattggtcaagctagcacacacagtcacagggtggctttagagcaggcaaggaggtctggagagacagcggcatgattaggagctcagactgctctcgctaaagtcctttgcacccacagagtggctcacagtcacctgtcaccccagctccaggggacctgacgccctctttgcctccacacaccctgcattcacgtgcatgtatcctctttgcatacacatagttaaagggagaataaagtttaaaagcaggcaaaggaagggctggggccgagaggtggtggagtatgtatgatgtgtggattctgggttctatcccctgatgaatggatggggaggcagaagaacctgatggctaaggtaggggggagggagggagggagggagagagagaggggggtacaagggttctggaattgaggaagcatctggacaggggtcataaccagggactgcagcagcctgaggaggctgggaagaggaaggaagcagcttccagaaagaacacagtcctgacacttgcattcagtctagctgagatctgggctgggctgcgcttctgaccctggaaccctttttgagacagtgtgcgctgttgtgaaggcactgaatttgtggccaccagcagtgtggccatggaagctcggatggagagcactgatcatgaatccccaacaaaatcaacaatatagcaactcgtggcaacctatcagcatccgctcaaagctcaaaggaactaaactgtttctgccttagagactatggcccgtagcctcactcgccaccgtggccaacacttactgatccttcaccttgtgctctgaactgtacatggttatcttgcttaattccatttagcaaagaaggaaagagagcaccagagaggtttagcaacctgccccgggcaacacagtacgcaaacagaagagccaaccttccaactttgttgtttctgacccctgagcttaaaaatctgtattgtttcattacacctgttccttcagaattgcatggaccacacacacacatacacacacacacacacacacacacacacacacacacacacacacacacgatgcaagacaattgtgccagccgaggagttgcaaacccctggagggcagtctccagcccatgcagaacctgtgccttgctgtccctaaggtcccttcccactctgctgtgtattcatagggaaggggctgtgacagtccagggcagactgctagtctttgctagttaaggccatgggaggtgactaggcccacgtgggtgtgtctggcagcaccatgtccccatgtgaaggtgaagctgccctctgtggtcacactgacccctgcagtgcagctgtgacaagcaactggctataggccctgggtgatagacagtaggggctgtaagagaacagcggctggggaagcctgcctgggccaactctgaactgcctgttcaagggcccgatgctgcaggaggaagactagatctctcacacctacaaaaaggccctcagacatctacctagcaaaggctttcatctcctcacctatcacagtggctttaaattgtctacaaaatttgcacaggaggttcccttgatggccactggaaacactttggtggctgttcattctgtccctttgaactactaactctggcgaatggagaggtttcctctcaactgctagaagtcccttccatcctttttgcacacagtgacctgataaatgccctactgggctatatgaggaggacaggctgacaccagtgggcctggatcttctggcagtttctagggaagatgactaaagggcagtgtgagtagcctcatggcagagaagtctgcctaaaggcagggcagcttatgaagcagccccgtgaggtgactgagctgggcattgattgctgtgtgagcatgggtctgaagttcctggccccagaccccccccccccccagtgtcgtcaggacacctccagaactccaccaggctcgctggcactgctgttggctgttagacacacacactatgctccttcccagcaggctgtcagcagggtcccttccaccctgaactgagaggcagcagagggaggcgctattagggcagacatactgggtctttcaggagctgtgatttggggtctatgtgtgtgtgtctaggagtgtgcatctgagcagctagctgcatgtggagcccagaggttagtgttggttgtcttctccaatcaatctccacttcattttcttttctttgagtcagggtctctcactggcctggagctcaccaagtaggctgggttgtctggccagcaaaccccagggactgccggtctctgtaattcagtctttgtctctcagtgttgggattgcgggtgtgtgctgatgcagtcagcttttcacatgggtactggggctaactcatgcttgtgtggcaagtactttacccatgaactcatctccctggcccatagctggtgacttcaggttgcctgtttttagagtcttggttgccaggagaggatggcaatggtagccccactggaaggggttatggttaacagtcactgtcagtttgagagggtctagaatcacctagtagactcatatctgggtatgcttcaaggcattatctaggttaggctaactggggaggtccaccctgaatgcaggttgggtctaagataatcaatcaaagggcctaaatgaaatggagaggtgaaattgagcactggaattcactctctgcttcctgactgcagaaatgggatcagctactcatgctccggccaccatggactgtatgtaactcctcaactgtgagccaggacaaaccctccctcccttaagctgctttttgccagtatttgtcaccgagatgagaaaagttactagcacaggttactatgtggagaaagtggccttgctatgtgtgaaatgactagaaaagtccttagtaaacactagttttcagtagcgaagatgtgtgggccctgtgtcttttcagacaacagtcatttaagaactgccacacactgtgctagacacctggtcacccaaggacacctggtcagcaaggaaagccagggcctgcccaggtctccttcttcctggaggatttagatgtacagacttgtcaagcagcagccagtttagggagttgtcatggtaacccaggactctaggctctccacagtccagccttgagcagtgaatgactaatggagggaagccgggttcaggtctctctagcctgcagccgccacagagtcttcactggaccagtccctgcccaggaagaaactggctattgtcaccgttcgtgacaccagcatggtttatggcctgaatgggccaggatcaaggtcaaaggctaagattggcccatagcttctgtggcccgggcagaatcctgtcctggaggagtcgcaggccaaagttcaggcccaggcccaggcccaggcccaggcaggtcatatgccttgtggttggtgccacctgtattccagtaagaacaaagtgcagggctgtggctgtgagtgtccctgtcccccttcttggcttctactgtcctcatggatgggcactcactttttggaaaagctttcacaaacagctagagctttaaatgagtttttggttgaatctttacacttccatttgtcagatgagggaaccaatgaccagaggtacagtcatttgcccagggtcacacagcaagttccttgaaggtcctccactaagatcgctattatggagaactggttcctagcagcccgggtcgcacagcactaggtgctctggctagtgagccactatcaacacttaggagacttggcaggtgaccctgcctgcccctgtcaggtcttggctttggggctggcatggccaatcatgttctcctgggctgggtgcctgttgtgtggtgtatttttctctgagcataacatgattccatcttggagggggaaataccttggcacagtagccatggcaactaaagtagaccaatacagtggttgcctggtctacggtaatagtaagggagccgatgacattctccagtgggtggagtaggggagggtagcagaaccctcacctggaacttcttcctgccctgccccacctccacccacagctgcaagtgatcctgggagatgctactatatagaaagtggaaaggcaattgaagactccatgatgtagcttcttccatggggtctccactgcttacctactactacaagagctccaggtgtgccaggactgtcttgtgaccaaagccatacaaaggctgtaaagctccttcagaaaaaacaactctatagatgacggaaaacagccactgttttccacagtcattcctccaaggtctaagcccttctagaaaacaactattcattctggtgtctaccctagagacagggaaaacaactatttcattctaatgtttaccctggacacaaagattctgctggactcccacaacacaccatctaggatgaggtggggctttactgcattccccttggcaatcacctccctccagaagtctcccaagatttccctccaccctgtaggttcaaaggtcacagatcatttctcagcatgagattctaacttggtggcctcagatttggcaggagggggtgaggactcatcttgtgacatacaaagaggtatttatgctttccccagtttctccccaggacttacttatttatagccttggccctttacttaaaaggtcaaccccatactggtaccccaaagatgggcttgctagcacttgtttgtttaattggtgtattgagaaagggtgaactaccctggctttctagggctgccagaacccagactttgggcctaaaaatccagaagcaatcttttaacagcatctctgaggtgctgtaccagatggccattcctttttgggggggtgggggtggttaatagtttcaggtagccaaagagggtctcaaacctgctctggggtctggatagatgactcagcagttaagagtgcttggtgctcttgcctggcactgggattctgttcccagcacccacgctgggaaggttcacacacgtgaatttcagcttcaggggatgtgatgtcctcctcttctggcctcaatgagtatctgcacacagacggtgcacttacatacactcaagaatgaatacacacacacacacacacacactaaatacccccccccaaaacaacaaaacaaaacaaaaaagaactctgctatgtagcagaggttggccttgagctcctgatctgactgccttagctctcaagcactgaaataataatcaggtcaccaagtttggcttaagatgaaccctgatggctgctggccctgaccctttggcaagcatcccacccattgtatttaaatacaccccaacagggttctttgaataagtggggttatccacatcctgcctgcatcctgttgactcgtgctcaccagacaccccccacccctccagagccctctgtagaccaggctccaggatttaacagctcttgcctgacctctctgtgaccccgagggaagacagttgggtggggctgagattagctggcccagaaagagaaactctggttgtgaaactgggagttcaaagctggcatctaataaagggctctggtcccaatgcatcttcattttgtacacaagccacaccatcaaggccactcaacacaatgacacaaaaaggccctgtggtcacgtatgttaccacgtagcagatgttgccacaacttccctctcccatagtgttacagccctgtgtgggatgactgttgtgtacagtgacggtcatgctcatggccatgataatgtgtgtgacttcagtcattcatgccaccagtcaacacagacaaccacagccaggctgacacttccaagtaccaccaggaaccaggagccaaggcactcacttccagagactcacagtacaataagattagagttgagaatgaaggttgagagaaacctggacaatggcaagccataactacccaaggtcctggcgagggcatgccaggagagctgtcttctcctgtgatgtgtgggcagacacccctccctgctttgagatttgtttatgtgtgtatgtatgggtgttttgactgtatgtgtatcatgcagcagtgccctcagatgccagaagagggcatcaggtcccctgaaactgcagttacagacagctgtgagctgccatgtggatgctgggaatcgaacccaggtcccctggaagagcaaagagcgctcttaactgctgagccatctctcatgtctagcctgacaattcccaattgtaagggaaaacccatcaactctgcaatgctctgttggtggcaacacggctttaggagcgacttactgggattgtgacaaccagacccctttcctaggtagaaggccaccttctcatgagtacagctgggcctgctttcttaaacggcatggtaggcagcaagctgggggcagctgaaggtgtttggaagtcggtatgtagtgttctggaagcagaggcagtgtctcttcacctagtgagatctaatgactagccagagaggctaagacaatcggtgacaaggtccacaagtcacctgtcattaagctacctggtgtgtggttaagtcacaacaaaggccactggaagctaccatgactaatttctgcctttgctgtaacatctagctgtgacagggagtcttcaggaatctgtggtatatgtctacctagcctctgcccctgctaccagcccagagctgggccaccatctgcctgatgctataggcaagctttgaaccgggtctttaatcaaggggatggtaagcttgggtcagctcagccacggggagagaggaggatggcacagagaggaagtggcacttacaaatgaacctgagggtcagacccaggctggttgcttcatgtccacatgccctgtaaatgcacaaatactgaggcagatgcaactccaggctacctcttacatggccttcctgaaatatgaccttggatcctcagtggggatactgggcccagtgtccccgcctctctaagtctccagtcatggtctggatatttgcatctaactgaaccaaagtatttggggtgcccaaatacttccaaacaatcccctcacaaaccttttcttgcttccatcaagaggccatgttaattaaaaccctgacaaacttgaggatgagcctgagttttgattgtttgtcgggagcaatacggaggcaccaaaaatttaagacagcttagctcaggggatgaaccaacaagggacttccccttgaacccacaacggttactgtttctgtctctgctcatcttggtgtcttgtaggtagggagagctgtttcttgataaagaacttttgattcttgacatctgtgtttcctttaagacaaactgttagtggttggagagatggctcagaggttaagagcatttggtgatcttgcagaagttcagggttcagttctgagcacccacatcaagctctaggggtcagacatcctctggcttttacaggcacctctctctctctctctctctctctctctctctctctctctcacacacacacacacacacacacacacacacacacacacacaaatctttttttttttttaaagaagccctttatttaggtcagctttgtagactaaggctcctcacggtctacaaatattgtaaatccaacttaactcaaggtcattatgggaaactgggttgccccgccccctcctggacatgctcactgtttgcaaaaggctgcaagcctcctcctgcccttcacactgggggaatctctcctaaattcaggcagggagcactcccagtgtcagactctactttcaccaatgctgctgctgctggtggctacctctttgctagcctcccagactcctgggccacccccagtacccagttcacacctgtccccaaccaaactcccacccccataacactcagcccttctgtcgacaagcccactgggccttaaatactcctggctctggggatggtcccaaggtccatgcactggccccagatgcactcaggcaagagggtccaagtccacattcccatgggatagctggaaaaagcttgctgagtgcagtggctccacgaacttcagatagttgcgattccagggagccctgagggaaggggttatcctgccagccaagtgaatggcactgggagtttcctaggcctccctggattttgtttcaggtgaccctgccaccaattaaaggcctatttcttctcatcagcctaggcttgtttcctggaaaagtttgtcctttccaaggtaggtggggttgtgtcttccagggtatgaacctgtctgatccactctgcactgttagcccccgcacccccccccaagcgccttttccttcactttaggatttgtttacagtcggtcaagtttttccagattaacaaagccttcctcataaagctactgcagtcaagtacaagaacagggaaccaacagcagggccagggccagctgggagattcagatggactgggacatagacagccaactagtgtcagcataagcaactgtcaccaagtatcccttccacgagggtccccttttctgccttccacgaggacacaccctccccaagagaaactgctgcgaacaacttttacttcagtgagtccaggggttaaaaacgcccccttctaaaggcaaagttaagcagctgtccaaaccacccaaggagattcaggatccctggacagctggacgacccccgccccagctgtgctaggacagcccggccagggaagagttaatgggcaatcaactttggctggcagttcagactccaaagttcagtcccagccactgaaggaattgtaaatctcagggcagtatttaacaaaacaaaagcaacctggaattacatgaaggtttggctttccacagagcttagttcctctaatccccaaggtatgcagctccatgtcagatcagctggcttgcctggtcctcctgccccctccttagcaacagtttaaatttcaaactaattccctagtttgttcttcgtcttcgcgggccggctggagacagctcggcctgccggtctcaaatccctctccattgctcttgccactgggtgggtcagccgagtctgcagtttcaaattgggtgacagctggctctccctccaatactctcctgcacgtctccaaaacctgggagcaaagggagctgcagccacccacactgcgagagacagtggacagtgggggcatagtgccacctcctaatccagtgggggatcccctctgctgaggtgggccagaggatcaaggttcaaggtgaggacaagggctctttatcagcgctggctgcccccgcacttctctttccggattttaaacacctgggcctcccagtctttccggcgggctagaccatccaagtcaactccttcttcaaacccaagccgagcaccccttctcacgtccctgccgagctgcagccgcccaggtttggactcggcagcgagttgccaagcaaaataccaagcgcaacctagcagtcagggtttccagctctacccaggggcgcgcacaccccgcgctcagcgtggtgcccgcaaagagggggagggtggggggcacaacaccttagagatgaagtcaggaggaaggatgggtgggtgtcctaagtctgggggtggatgggggtaaatagccagccaaataccaatctcaggggagccgatcagctcaggacttgccaaaaaaaaaaaaaaaaaaaaaaaaaaaaaaaaaaaaaaaaaaaaagactcgggtgcccgggaaatttacaaaggttgacgccggctagtttagcagtccctggtgatgcaaggggtggcccgagactctcagcttgttggctctggtttccgcagccgcagcaggtgggagaaccctcccctcccaacaatccccccccccggcacgcgcgagcgccagagtcccctcaccctcagcgcccacttccaggtgtcgcagtgccaccccgcccccacgtcgcgtacctttctggcgccacgctctgcgaactcccgagcgaggtggcgcccgatgcctctcccaccgccggtgatgaggactgactcccgggacaggtcccgaagcttggggggcaacaccagtcccacggctgctttggtcaccagatagatcatttgcagggggaacactaccagcgcccccagccatttccacaccatcctccgcgcggcggagccgggcacagggggaggaggtaggaggcggtggacgaaactccccggactaagcaaaacaggaattaaaaaaaaaaaaaaaaaaaaaggaaggaaggaagaaaatacccccaaataataaataaataaggaaaaagagaggcgtcccacctggccactcttgaactgacctcctctttccagatgcaaagcactgggcgaggaaaaggggggtggtggtggtggtggtggtggtggtataaactctgctccggcggagggggaaaaagcgtctcagaagattgggaccgtgagaggggtagaggggaggccgggttgggaagttctaacaagaagtttcttgcctcaacagccgtttcggctgggcgattcacaggtaatgtttacagaccgacagaggagtttaggcaaggcaagggaagggggggaaaaaaaagaagaaaagcaccaaccacaagagcgcacactgctacagtccgcggtttcaaagtgcaagattaaaaaaacaaacaaaaagcagtttcccaattgtagcgccccctccagaaaaggaaaaatcaaaacaaaacaaaaataaacaaataaaaaacaccacacacacacacacacaaaacctggggagtggttgcagctcccaatttcagtccgccaaagtctcccaactcattgctattcttgggctcaggaaattgcttaaacgcgatctgattgccagcaccgtgcaagagaagtggggggtccgggtgtcagtttcttcccgtgcacggctcgccctcgcgcgcgcccgctctctcccgctcccgcctccttctcttgcagcccgggctgggagttgccgctcgatctggcttcctctctctctccttctctcccccttagcatttattgccttctttttgtcctttccaacttggacggggccggtttgtgaagcacgcgtggataggacgccctcgtctgcaccgccgtattccttcgttcacagggcaggagcggcgtggacccaccgaaagggcgccccctccctttttttttttttttttttaataccccattaagtctgattgacagttaaagttgttgggaggcttcactaccatgcctctgagtggctgcagcgacttcccctccccctgcgccgtggcggggcacgcgcctgggcgcgcacccggtctcgctgcgactcgcactctcctgggactggcttctcatttctgcgagccgggacttgccgccctagtccccgagggctccccctggaattcgaacacgctggaaccgtctcaggcaagccggcttgctccatcagatattcctcccagctcgggccaggtgaccacccctgagcgcgtgcggggcaagccgagggggaactcgcgcatgtcttgatgcaaccgggtcgccaagggttcatttcaggtcacttggtcatccccccctgcctccaggtagggccaggaagtcaagcttcatctttgcctggccctttttttccttcatggagtgtacattcgaagttatacgaacgtggagtctcccacgttgcggagattggggcgggggggggggacctctgggagcaggattttgctttgagagaaaggggagcagggaaaagtaacccctgatcccaggtgccaataaaatccccataagattagcttggagcatatttattgcgtatctgggctagaattaccttgactgacagcaatttccttagtaagaaaagcctgtaaacaacacgtcttcaacctgcgcccctgttcagttcgtgcggttcccccatctgtatgagtgccccttcccccgctgctgccttgttgggtacccacgtagtaacctcttacccaccccttacaagaacgtctccctgttgggagggtgggtcccagctatttagggttgcctgttgcgggaagtctgggaggtgagtcatgaagagcaggcccagttaaaagcgctgatgagacttgccgcccgccccctctgcacatccttgggcgggagaaggagagacagccagagagccggccctgtaatcccgggcagccttttccagccctggacgtgttcaggctgggagtcctgggcctcagccccaaagactcatccagcaggccctgggtgcacagggaaccaactgcttttacactccccgcctgggtgggtgtgcgcaagtcctttagagaggtgctgatttggggggggggggggtcaactcctcgttgccaactactgtggttctgggagaaactaggcctgagaactcccagtttctggtggagccaaagggacggaggagagccactctcctgcctgcctgtctgttctgacattccaccctcaggctgacctcgccttggggactttgtcatcctatttcccaggttacccagccaggaagcgcaggagggagggatcggtccagacctaatttctcttcccaccccaccccaccccactctggcaagaaggcaggcgaagtggaggacaggcttggccaaggactgcagagaagagactcactacagacaggctccattcttctttttaaaggcctgtcggaagggctggccatggccttcattagatcccatcccaccatagtgaccgggtcacctcgtcttccaacaggaacgatatcccagcagcagagagccagactcttggtgcccagcacttgctcaggtctatgtagaaaactcgagcgggggagaccccaacaggctgcatagcttctnnnnnnnnnnnnnnnnnnnnnnnnnnnnnnnnnnnnnnnnnnnnnnnnnnnnnnnnnnnnnnnnnnnnnnnnnnnnnnnnnnnnnnnnnnnnnnnnnnnntatggtttcagtatccctttctgtccttccggtccaatgcagaccactgagttaacactctgttgaactctagatagagttccaattcctaaaaattgtacatttgcctctctaagaggccatttctgaggccaagacttttgagtaataatagttacatccgccccagtgtccactaagccagaaataactttattattaatttttacttttaactgaggccttttatcattaatagaagcttgccaaaatatgcgtttctcattttgtccattcacacttgattcttcatcactattcaaattaccatctagagcagtatcttttttcacaataggcaatgaactatctaatgttcctgtgagagattgtctcccactgacactgggaatgacccgacctttctcgatatgggggacttcttgaggcccccctcagggtttcccgaccttaaggggtttccatgtctgtccctggtcgatctacattcattggtccagtgtctgcccttaccacatcttctacacaatccagaaggcagtggccttccatattaggcattgttagaatttgtttgtctacaatttctcttagtatgtcccattttaccacagttgaaacatctaggttcctggagccttcgtggtctccaggggaaggctcttcttccccaaggttctggttcatagtagtagtaacctctagcctcttggtacctatgttgacctctgtaaggtgcttctccttgccaagcccttacatcctcacctctagaacttttaatttcctgttgccgttttaaacctttggagatggcttctcctacgcaagctccagtatcttgcacattataatcaatgttggctgcatacaaaacccattcttctagcggagctgatctgatctttaaaggcaaaaatattcttttgcatatagggtttgcattttcataagctattgtatatataattgattgtcttgtttctggatctgttacctgtaattctactgccctagctaacctttgtaagaaatcctggaactgttctgtaggtccctgttctattctggtataagcttctaggcgttctccgggctcacgaaccttatcccaggcatttaatgctgctttcctgcatagagacagtatatcgtcatcatattcagcctgaacctgtgggtcagcataaataccctgaccaagaagcttatctagaggggcttcaaaccttcctttatgccctgatgctcaaggagctttgcctcttcccttactaatgccttccactggatttggcatgaattctcaagtacagctgctaccaatcattcccaatctgtgggtgtcaccctgttaaaggttgcccatgaatgtaatagctgttttacatatgggctatggagaccatatgagacaactgattctttaatattcgtaagatccttcagctgtataggttgccattcataagccatctgtccatgagggtgtttcttagaagctggcttttctaccatggttgctgggtacactaatggtgtacgagtaacaaccttagaagaatagtcatgatacctaggtggagtaggtgcctgggattggagtgattctgcttctgaggcatcccaatgatctttaagactagcaatgatatccttttgaaaagtttcaatctccttaatcataaaagattccaagcacattagtgaatctgtaaattgctctaactgctcatctacatgtttttctaggtctttaatacgatcatccttaggcagcatctggatggcatggaaactgccttctaggtattggagtctagattccaggtcatgatttgctgattttgagtcctcagcaattgaccgtatggacctatgtaatctgtcagctctgtattgtaaattatcttccaaacattcaaatctagactcaaatttctgatctgctaccttggatgcttcaataattgattgaatggcattgtccaattcttcaatcctatgctgggtattttgcaccgttgcatctagttgctgggtaacattgcctatctgagtttctagctggctacagatattctttagctggtcatggtcttctgacagcctagcctctaaggcctcagacatggaggatctctctgtgtttatcttatcataaatacgctgcatctcatcagacagctgtctttagtgtattggacacagagccaagcttatcatccaatttctgttccacttgctgcacaattgtggtctgacctaatcgtaaagctgttatttcctgtaagtaggtggtgaggttatccttatccctattcctgagtcctctggctagtaatactatttgtaccagcaagctaactgccattatggcatatagnnnnnnnnnnnnnnnnnnnnnnnnnnnnnnnnnnnnnnnnnnnnnnnnnnnnnnnnnnnnnnnnnnnnnnnnnnnnnnnnnnnnnnnnnnnnnnnnnnnnctcccacagcacaatggtaaaggtgggcactcacagagaattgatggtgccaagagtagccatttcacagactcatgaggcaaacaggagggaatacactcaggaccaatgacacgtccaccaccatacagtcctactgggtctgggttactatttaacagattattagaacaagagttaaagacataaggacagaggcgacctgcaggggtgaaaagggcgcctccagaggccatcgtttgttaaatgaaaaccacaggtgccagagagaggtttcctccctacaagttgttggccagagagacatctgaggccccatcaaacataaaggctcttgcctctgcagtttgtaagactattgctagagaaaccatgtggtctggttacagtacagggagaaataaacctgggacagaggtgaaagttttctttttactggctgtctttcatagtgcccgaaggtgctgtgtgcactgctggaagaaaactgtaacaggatgccctgctcagctttggtccctgcatgctattgtaccaaatgccaagcaaggtgtacctaattgtgcaatgtagcatgacctttgtgggacaatcaacagcttccaattgcatgtgatgcccactacatattagagacttcacgtctggtactgtaagccaagacaaaatccggtgtctggggaggccatagctaccagagggaagccccgatagtgtttgctgaatgtgtacgatgtgcttagcaaactgccttctgaacatttgtgcataagcccagcaaccactgctgctgttgccctcagaattccttttcagtggatgttgtatctcagaggagcaacaaccaccaatgactctcctaagagcaagtggctactgatgtggttggcacagggctctctgagcagaggtgcagaatggaggttctcaggcctgtcaacagcaaaaggccccaaaggacttgaatatctgagaccagaggccacattcttgagaaagacactctccagctccatatcatactgctggctgcttcttcctcagaggccatcactgcactgcccagactcccttggaagccatcgaagacactaatgcaagtgtgaaatgacatagatgtctccctgcaccgagccagaagtctatgaggagaataaccccaaacatgccattccactcctgctctccacctctacactaaataataattgattgttaacaattttgaacaatgctcaggaatgtatgaaactttcaaagaatgaataagtattcttttgtattggtgttgaggacaaaaaacaaggccaagcttctcctttggggaccatggaatgtttccaggctattttctctcctaggtaaacatcttctctctcctttctctgttttggccgtgtgaacaaaaactacttgtatctctccatcttcaccattctcttaggcagcatgtgtgggatcttcagctggagagatcaggcagggtgtcccacatagaacccatcctgcagagccaacaccacactcaaccccacatctactgtgagcatatataataagcaagcatcagcacgttctcagattagggactgttttaaaagtaaaatagtaagattataatgatccacatgtttctttgccttgtggacccaatgccctaatttgtagtgccaggacctcagataagcctgaagcgcttaaactgtcttatttctctaacctggttcatggtttgtgatgggaaatcttcacagaaaatgaacatatgtttttacaacttttcccagcatggtcattcaggagtcattacttcattgcagacaaggatgctgaggcacagaaaaattagccaaggggctctcgagccggtgcaaacagcggcaatgcttcccagacagcatggctatgcactcagcacctttctccccacacctccttctcttctgacctttgaggtaatcactgtgaaatatctggcaactccccggtttccagttagaatttcaacatcaaagacttttccaaattgcttgtctcatatggggaaaaaccatctgccactcttctactgtaagtattatcatgggctgatcgctgtcctcaatttccagcacagagtgccaccatccatgcacctatgttaaagggtgggtgaatccatcacattgacatcatcaaagagggcctgacctgtgctcagaacaaagatgagtaaattcatccctgtcctcagggtctcacgtggatataaaagatcaccaggagacaagcacaaagagcaaggggcgaagggagagtagccccttgtgcttttgaatctttcaggctttagggggtagcacctgcatctgaaattattttcattatcttcagaaaatagcatcatacacaagatggagtgatacaccctgtagtttcatccctgaggagatgggagtagcagaaggtgagttgaaagattagcccattctagatacattgtgagatcctttctcaacaataaaccagaatatggaagaaaagagaaaagaaggaagaaggggaggaagcaagggagagagagaaaatccaagaggagaaaaagggaagggaaagatctggggaaggtgagacttgggagataagagaagcccccgctcactcttatgagaacctagagaaagaagagaggacgtgaaaggagaatggtaagattcaaagaacacccccaacccatggtggccccaagagaaaactcaccagagttaccacatacagcaacatgccgtggataaaccataacttcaccgggtgcttgagggtggagggaatttctgtagtgagaaagtgctgaataagaacccatgcaaagactcccactaagaaggagggcagccctgccagcagcagccacaggacagccatgacccagatgctcnnnnnnnnnnnnnnnnnnnnnnnnnnnnnnnnnnnnnnnnnnnnnnnnnnnnnnnnnnnnnnnnnnnnnnnnnnnnnnnnnnnnnnnnnnnnnnnnnnnnccaattaataaacgatcaatctcatcattgccttgtgctagtgggcctggcagacccgtatgggatctgatatgtgtaatgtatataggattacttctgtttctgatagtttcctgtaattgtaaaaacagagaagttaattctgtattatcaggaacaaattctgcagtctcaatgtgtaacacgactctctctgcatattgggaatcagtaactatattaagaggttccataaaatccatgagtaccatgagaattgcatataattctgccttctgtacagatgtatatgtactttgaactactttacttacctcacgtgctttataacctgccttacctgatttgttggcatcagtgtagaaggtaagaactccagaaatgggagtttgtcttacaatacgtggaagaatccagactgtcttttttataaatttaattctgtcagttttgggatagttgttgctaattgttcccaaaaagtcagtaagaactatttgccaattatctttccataaggaagaaatttcttcattagttaaaggtactataatttctgctggatcttttccagtcagttgacggagtcttaatttgccctttaaaatcaaatcagaaatcttttctatatatgtctttaactttttattctgtttatgtggcagaaatatccattccaatatagtgtcttccctctgcatcagaatttcagaaggttattctctggatggcaagattaccagaatacagtctaaattaaggtttatccgatctacatgtgcatccaatattctgttttctacccattttaactctttttctgcctcagcagataatattctaggacagtttaggtccttatcacctttaagggccatttttaagtgctttaagtcatgtccttctacaccaataatcgtctgtaattgagaaatttcccctaataatttctgaagagaattaagagtttgataacgatctctcttaatttgtaccttttgaggtctgattctctgtaagtctatcttgtaacctaaatagttaatagaatctcctctttgtatcttttctggggcaatctgtaatccccaacgaggcagaacttccttcaccatttcaaacataccttccaaagtttccttattagaatctgataaaagaatgtcatccatgtaatgataacaagagattgtgaaaatttcttatgaattatttccaaaggttgctgtacaaagtgttgacacaaagtaggactatttagcattccttgtggcaaaacccaccactgatatctcctaactggctgtgaattattaagagttggtacagtaaatgcaaatttttctctatcattttcctgtaatggtattgtgaaaaaacagtcttttagatcagtgactttaataggccatcctttaggtattaaggaaggtaatggcattccaggtttcagagagcccattggttgaattaccttatttatagctctcaggtctgtcagcattctccacttacctgacttctttttgatgacaaatacaggagaattccaagggctggtaatttcctctatatgtccagtgtctagctgttcctgtactaacttttctaaagcctctagcttctcagaggtcataggccattgtcctaccaaactggttcatctgtaagccacttcaatggcagggcctttggctcctctgaagggccatcatttatacctagtttctgtacagcattgatgattggtaaccgttttccatagcgtcttaccagatcttttctactatctaaagattgtacataatttgtatctgacactggaggaatattaatctgagtattccattgctgtaagagatcacgaccccagagatttatagctatatctgccacatatggtttcagtatccctttctgtccttccggtccaatgcagaccactgagttaacactctgttgaactctagatagagttccaattcctaaaaattgtacatttgcctctctaagaggccatttctgaggccaagacttttgagtaataatagttacatccgccccagtgtccactaagccagaaataactttattatnnnnnnnnnnnnnnnnnnnnnnnnnnnnnnnnnnnnnnnnnnnnnnnnnnnnnnnnnnnnnnnnnnnnnnnnnnnnnnnnnnnnnnnnnnnnnnnnnnnnttgaggcgggaggtgcagaatctaacttcggatcacagtttgaaatttcacatccgagccttgggcagagggccccacactttttttttcactcccctcctgacaacctgaaagaagcctttgtgggcttgatgggagaggtgagcggctgcctgcaaaactaacttttccatgactcagccctgctggggctgggcacagctagggaggtgcaaggaacaacccccctgtagggccagctggagccttgtggccaagctgcttccaacgttcctggtttgtgattagagacagggaagagaggttgctggcctcagggttagaagtaggcaatctagggactggggagatgttttagtgagtaagagcacttgctgtgtgtgctggctggtttttacatcgacttgacacaaactagagtcatctgagaggagagaaccttaattgacaaattgtctctagaagatcaggctgtaggcaagcctgtggcacacttccttaattggtaattgttgtgggagggtccagttcactgtgggtggtgccatcctgggctagtggtcttggatgccataagaaagtagaccaagcaagccatggagagcaagccaataagtagctcccctccagggcctctgtatcagctcctgcctcctgcccagacttcctttgatgatggtctgtgatgtggaagtgcaaacgaaataaaccctttcttccccaagttgcttttggttgtgatattccatcacagcaaaataaaccccgagacaccatgcaggcatgaggacctgagtgtgggtccccggtacccatgtgaaaaaggtggatgtggcagtgtcctactgtaatccccagggctggaggtggaagggggcagagcagacgggtgggtggaccctgggggcttgccagccagccagccaacctagctgaaaaccagcaagctccaggttagtgagagaacccatctcaagggagtgaggcggagaccaacaggagaaatttgaagtcctgtttcaggccgctgtgtatgtgtgcactgggacgctttctcccatgcatatgcaagtgcaggcgtgcacactcacacacagcggactgcctgagctagttttacatccttccaaagcagccagtggcttcttgaccaccgagcttgtttaatgttccacccagtcccaagcaatgaaggctgagtggattttcttttacaaagctctctccctgcctccatcgcaaatgggccttcagagttgagatatagaaaggcttgcctacctcagactttgctcagttcaggggtggctccatgctactgggggacagctgaaacaccagcctggggacctcgccatggtcccttccctcgtaaggcactgatggttgtgcagaagaatcctagaagcggatactagtagccactaccgagtccttctgcctccgcccacttccagctcttttatgtttttgcagcactaggaatggaaaccagggctctaccacccagtgccccacccccagcccagcccagcccagcccagcccagcccagccctctagctctagaacagggtttcaaatgttcagtgtacacacacacacacacacacacacacacacacacacacacacacagagagagagagagagagagagagagagagagagagagagagagagagaacgcagatacacagtacacacctctaacttagcaggcagaggcaggaggatcatgagtttgaggccagcctgggctccatagtgagttccaggctgaaaagttggagactctacctaaaggcttgtgctctgcagggccttcccgatgggtggaagcttggggggtacatgagctgtacaaggcaaagcccgggcgacttgccaggccaaaagtaacagagggagggggctgcagactttggatgggtggaaccctctgtggggaggggagggggcatgtgggccctccatataacaggaaagcagtctgcaaaggcccagactatttcaaccctctataaaacacctccccttctaatatagaccatctgtcagcagtgctcctttctctttggccaagcctggtcgctaggactagaatggtgaaaagcgggtagaccagctcctttgagcccacacagccccctaacccccagtgccctgagcacacaggtggctgtttttcctgcagtcacatagcctaccccattcccacctcagcacaggccgagactttcattttgttgctcagatcccaggctggcaatggagaaggcttttttgccagttctgggagagctgacacgggcagacagggttcttgctgccagggtcagatgaatacacagggtaaaatcaaggcaggagaggtggcaggaacagggaggtggtgggaggggtggtggtcaggtgactcacgggtgccagcagtctcagtctctctctctctctctctctctctctctctctctctctctctctgtctctcccccccccacacacacttaaaataagggaacaaataaaataagggtggtgagatggctctgtgggtaaaggtgcctgctgcgccaactgagcctgatgagctgaacccagtacctccgagacccacagggtagaaagagagaacaaactcctgcaagttgtcctctggcctccatgaacaataaatatcaaatgtaacaaaattttaaaaatgttaaaagaaatcttaaaacttcccaaactagccaaaacattctaaaagcatctattgtgccccaagtgctattctaatttctcaaaggtcatgtgtcattcattcctaatggatgaggacactaagacccacaatagtttcacatggcctcaggtttgtaagtggcagcatggggttaaagctagagatccaggccttagcttgttgctccctgacaactggccttgctggggacttcctatgtcatgggcacttactaagagtgctcttaggccacaggcaaagctttgtccctgcctgggggggggggcacagaaggctcctggctttgcgcacccgccctggcactgggccgtttgtttctttagctgtgtctggcctgctggctgccagtgggtaccgagcttagaggtgctgccacccgctgtgactcctttcattgcagctccatctttgaaaagactgttgggccacttctgttcctgcgttattgtatatcatcctaattagtctctctctctctctctctctctctctctctctctctctctctctttctctctctctctctctctctctcacacacacacacacacacacacacacaccacaaacaaacaaaagcacaagaaacagaagaaaacaaaacgcacaaaaaaataaaaataaaaaaagaaatcagatagcagacaaatttaagagtgtgtgtgtgtttacgtatgtatttacattttgctatttttgtgtgtgcggacatgtgcctgcctgctcatgagcacgtgtgccatggcatgtgtggagatcagaggacaacttgtgtgagtaggttatctcctttaccatgtcagttctggggaccgaactcagttcgtctagtttggcagcaagctcctttatcctctgaaccatcttgctggctagagcgtaggcatttaaaatacgaagccttaggtctcaggctcgggataggtgtagctctatggtaaagtgcttgtctaacaggtgaggctctgggttccatccttactgtactccagaggttggcagaagaaggattgcaagttcaagacaagcctgagctacaaagtgaaaccttatctaaaagtaagtaaagttccatgaaaaaaattctgcccccaacttggttactaccttttcctgagaactttccagttaaagggtccattgctttgtataatggccataacagtctccggctgaggtctctctctctctctctctctctctctctctctctctctctctctctctcgtgtgtgtgtgtgtgtgtgtgtgtgtgtgtgtggcactggtttgtcccatttaaaagacaaggcagctgagatcagggaagggaggtttgaatggtgtggagaggacactggtgtaaagagcaggttttctggaggccgagaacttgcagcctctgtcaggtgcttgttgaacttgtaaatccgtgttgccttgaaggaactggtcaaagctatgtaagtgcatagcactgacaactgatgtcgttaaaaatgtaaccgagggctggggaaatggctcagtatgcctaacatgtaccgatcaataccagcactccataaacaaggaacagtggcacttgggagacaggggcagaaagagcagaggggtctataatctgtctgtcttacatcagtgggaggggggattaaggaagtcagctaagtctatggagccagagagcagcagatacaaaagtagaattttggctgaggtttgctcaaaagcacccacctccaatgtggtctctgttcccttccctgaagcgttgtctacctctgtctgtttctgtgtgagaacacgcatggatacatgtatgtgcatgcacacggccgcacatggatgcacctaccagcacacagagaaagatagacgacttaccagcctggcaactctgcctgtttctttgtattgtctagatttaattttattttgtgcatgaatgttttgcctgcatgtatgtatgtgcaccaggtgcatgcgtggggcccttggatgtcagaagaggacatcagatcccctgcaactggagttccagatggttaggagttaaccatgtgtgtgcttgaccttgaactctggtcccctgcaagagcaacaagtgctcttaaccactgagccatctctccaaccgtctggctgtctcttgataataatactgtatatgattttcactctccctctctttgtcctgcgccccctcgtgtgtgtgtgtgtgtgtgtgtgtgtgtgtgtgtgtgtgtgcgcgcgcgcgcgcgcgcgcgtgctggagtgtgtgtgcttggctgtgcctggcctccaactcactgtgtagctgaagatgaccttgaatttcaaatcttcctgcttcctcctcctgaatgttggaattatgggtgttcacccctacacccagtttatgatgtggtgttgggatttgaacccaggatttgatgcatgctaagcaagtactctatctactgagctacaccctgatctctgcacgcagtttctctaaatacccatttacacatagccagtgttgtatgctgagcttttagagagtgcccacctagtgattaactttaaacttctttcttttttgcaaaagtaggctttaaaaaaggatcagaaatcctggtgttaggtcccagaggccctacatggagcctcctctaaaaacacaaagacaaaccccaagtcagagaaggaaccagcccctttgttcctcagaaccaagtaatccatcctataacactgttctttgcaagaaagttctgtatataagtttcataaatcccatctgtggagccaaccctcaacccaggacagaatctgctaatgatcactgcttgccaggagcccacaggaaaccaccagtcatgttgcaggctccatgcctgcctcctgcctgagccttttccaataaagcctcttttcatgactttataaaaacactgctcagatcgggttgggtctctgcttcttccagggtgaatgctgatgtctgtggggctggaaggagctcaggcctgcctttgagaccaaggaagcaacgggttttgacggacggacagtttcctgccttgcgtcacccctttctcttcaaggacggtcctgaggctgttttgtgtgaaaggtggctgtgtgggacacactaagtgtgaaatacagcttctccacctggcagatcttcctggaagtgggtgctgcctcaacaattcccaaatgacttcagacatgaaaagtaaacaccaagtgtcttggtttccccaggtttaagatgtggtttggttgtctagtagggttgttgttgggacatggtatcagctggcacttgataggtgtccactattcttcagttcccttcttgcccctgccatattgtcagctagatagtcacctgcttcttaattttacttgcacagtgtttcaagtttcagaaatgttgtaagaacagaaacaggaagttcaagtattgttcatctttataaacatttcttttttaatttctgtgtctctgtgtatgagtaaggtacatgcagatgcctgtggaggccagaagagggagttagagcttttgagttggaattagaggagttgtgaaccccctgattgggtcctgggaatagaactttggtcctctggaagagcagccaaggctttaagcactgatctagtcatcaagtttttctttatttccatttgtctcggtagtccaggctggcctccaattcactgtgtagatgaggatggttttgaattcctgattctcctgcctatacctcccatacctcccaagtgctgggatcacaggtctgctccactgttctccatttatgcagtgtagggtataaaactctggcttcatgaatgctacacagataggaaattagagagaaaatttgagggacaggagactgtcttttgagagaaaagcccctcacccaggtgtctggtggcatggctgagcctcttattgtagtagaacaggactcatctcagttatcagctcttcaaggcccttttccctttttcccagctgcatgccagcactttcctggaagcctccctggaaagctcattttttggatagacatgcactaaaaccttgtgcaacaccagtgtcttctgattctaccttcactcactataactccatcccaaggcatcctagagccacctgtagctctcttaccagaagagaaagagagagagagagagagagagagagagagagagagagagagagagagagagagaggaaaatggttcttaggtatcttttggaatgtaacttcagaattgctaaaatgtatacctgacagatgccaggcaatctattgcttcttctcccccgagaatacacctgtattcatacttgcgtgtgtcttactttcccatactctcacttgggaagcacataacccctcttgggtgggctgaactttgttctgagcactcctctttcttttacctcctatccttaagcttgtgttgaattcttctcttcaataaaatctccaactgggagagacagtggaagccagtcatgccatgggccctcactgcccgctcatgccagggaacagcagaagacatctgactaccagaactggaccctcaccctcatccccaactacacctagaagaggggtcgctggagacgtggcaccaccgacacctggaggagcgaccactggagtcttggatccatctgtagaggaaggaatggtggaggaagaggggcccccagaagcccaggtaccaccacctctaccaactggaagaagagatgggcagaaaaggtaagaatacactcaacacacaaagagcagcagggcagcaccagaaaccagtggtgctgcagcagcaagacctgaacatcacaatgtagatgaagctgaagaaaacaacattaaaaataactttatgaagactattaaggcccttaaagaggaaatgaaaaattgttgtgtttttgttcattttttttggtttgttgtttcagttttgtttcctttggtttttcttcttaaattgtgttgtgcttggggaatgttgcaagggcagagggcagatgtgggggacagggagatggttgggaattgatgcattatgtggaatatgaaaaaaataaataaaagtcaaaataaaacactaaaaagaatccttccattaagggatcaagggtctgaaactacattggaaagctttcctttaaagagatgaacaaacaggtggttggcttgaaacaagtagagaagctctgttcttagctaaactgcccagctgtaactggagtttttctttcccaccaggccccattgctgctttaggcccagataaacacacaaagacttgtattgattattaatatgttggctgatagctagggcttcttattggctagctctgttttaattattaactcatttctattaatctatgtatttccgcatggtcttggcttacacgagaatgccaggacctgttactcctttggcagctacatggggtctgttcttggtctctctctgcctacctttcccaatattctcctggtctcctagtgccacctatcttccttcctctattgaccaaacagtgtctgattcatcaaccaataagagaagcacatatacagaagggtatccccccatcacccagccacttccaggatactgcagatatggttccaggaggctcagctatatctggggctgggagcagaactcagcatcatccacacgatgctgcttttaaggtcatgcagaatgtagtagtgacagacactggagacttgcgccaagtgtatgtagaaaatccccagacagacagtaggtggcagagtgagaatctccacccagagcctttgaatggacttcaggttagagtctattcgtaatcacatcacagaatgttgggactgacagccttctcaagagacaggccaaatgtggtacaaatgttagcactgtggaagcagagctgtcaaagccaactgaggctccgtaaggaaattctgcacccttgtaacggtgcagatatattggaactttggtccaatatatatctatctgtgttctaaagtttgtgaatggagtgaccactctgcaccattacatatgggaagatgcagctctctttattattttataggggctcgtctctaagagtgtgccttgaatcacaggaggaaatttgaatttggggactttcgaatactttggggactgttaagactgaggactcatgaagttacatgaatacatatttttatcgtgtgatgcccatgagacgttgggattcagaaggagactgttagggcgtccatgcagaacatccaacagagactcatgacttgaggacttatggccagcctttggcccctttctgagggatggagagtctttaggagatggaggctggtgggtcactataaaggacccaaacatttggagaagctcacatggagagttaatatggaagttgagggcaggtgttgtgagaatttgatctgataagcccatggcattggggttaccaagctctatgggtgttgtcttctctgggtgcgtgactagataagaactgaggaccagggtccctttccctctcttcttttgggtttttcgagacagcgtttctctgtggaggctgtcctggaactcgctcttgtagaccaggatggtctcaaactgacagagatccgcctgcctctgcctcccgagttctgggattaaaggcatgccccaccactgcctggcccgccctctccttgggatggtgcaggaaccagcggagctacagcttggagttccctttggcaccctgaggttacggtgcagcccctgagagctggatccccatacggatggctgagctggggacgtgatacagattcttccttctgtcttgtaatcattgtgtgtggatttgatttagtaaaaagcaaaactgtacccagaattcatgctttatctggtgcccaacgtgccttgtccccaaatcactctgccggtgcccaccgccccacatggcgcatcagctcctcccgctcccaaccctgcctgtcagttagggcgagccctggcagtggctgacccacccccagcctctgttctgtgtaaccttgccccactgctggagctgcctgagcaaacttggcttaactggctcttaaaacccctgttctgccagcaggggcagcaagctcttctagactcacccttcactgcagaaaaggctctcacagtcagcacgtttggctgcattggtggcagctgctgtccagccagcatggtgcttgctaggccccagatgcttctggggctcttgtcccattgtcctcctccttcacctcagtctcctgctgcgttctgagggaagtacctgcactaggctgggccagtctgggcctctgcagctccaggttgtcttcccgaatgggtcctgctcagcttgtacatacgccaggcatattctggacctgctgcttagagcattttcctttttcattgataacccccccaaatccagctcaatcaaacgctaaaatgcaaatactgcagcatacagatagacgctctttctaaccaagtttgttaggtacaaatactctgctgtgcccaggcatatagttcattttcccccatcctccttctggggtctaccggagttgtgcctaggactcaacaggtgccagattgggggctggcctaggtgggacctccatccacacgacagtcagctcctggagcgttgagtcagagtagctgctagctctacaggacctgccttggcaccacaactctgacctctgctggccaaacatcattattacatccttaaatcagcacgagccagctatctgatcattggctctgtctgctggtcaatcaagatgatcacacctacaacaattctccgaggattataaccaaggtaaattatttgacaactttaaacgttagaccaataaataaataggcagataaatgaactaatgaatgactaaataaatatatgaataagagtttataatttataaacctttcccatgtcaat

SEQ ID NO: 7 - DNA, 31628 bp, Cricetulus griseus
  >scaffold_3 dna:scaffold scaffold:CHOK1GS_HDv1:scaffold_3:14201037:14232664:1
gtgaataaggattagaataaaacacatataattcagatttctttcttcttctatttattattaacttgctagttcatggggatattctctaaattcaatagctcttgtccatcctttttccaatataaacacatcatttttaaagccatattcattttccagtttgttaaagtcttactgtataaacaaaatgttctaggccatgaaggagctgagctggctcactcatccaatataatacatcacacaattctgagctaaccacatgcagcaaatttggcttgtgatatgatcaacttacccaaacgttaaataagaccatatatgactcatttccatcagaaagtctgagtcaccaggccctgggcaaggtcacagacattaaagtaagcttctcaaggtggaaacacatgaccattgtcagaaccaatcgatcaacaaatagatcgtgacaacggtcttagcatctattatttattgagcagtgattatgagtttatctgtctgacatcatccccaaagccatcttgtaaacctacaacaaatggggaaactaaggatataataagactaaacttccttgcctatggtcataggttcataggtaaatattaaatcccatttttaaaacctttaatccaaaaccaaataaatattttttctagtatatcagattatatttagaaactacacttctcacacgtgatttcaaaataaaggaaaattcaatgattattatattatcaatattaaatgtaggatagatgattttttaaatctaattagattatggagaatagaaagcatttgcattaaaattataaaaaaatttaagatatactttcacatatcatctactaacatttttatacaaatccataattgagatttccaagaagttataattacttaaaagggaaaactcaattgaaatattgagttgaatttaattatgataacatagccaaagtattctaaatgttaaaaatttttatgacaagtaatgtaaaatatatatatataaatgcatatatatatttaattatcaatgttaggaatgatcatgttcaagacaataatgacccataccttactcatcaagcaagcaaaacagtgaaatacacaaatgaatacaatgaaatacacaaataaaagtccattgtgataagcaaatagaccctctgttttctgtctcccacacttctcatccttgtatttggaactatcaagtaataaattttttctataccttcatctagaaaaactgataataacaaattttcctattcctaaattattcaaatctaacacttctatgtatatgcatatatttacttattagtaataaaatttaagtttttaagactatattatatttatgtcagtataagtctcaaaaactctcatctgaaacataaaatactaactttataaacagtaaatttagtcatttatcaacaaagaccctctttgttctgtgctctggagacaaaatataatttgcattttctagatatcaaaaaaatagtaattactttttcttattacagctcatcaggccagctgtggattctataatagagattagtcttattctggtgcacggaaaagcactgatattaatctcagaaaaaaatgtattatcattggtgaggagctgattactgactactgagccctttaaaaaattattattattatttcataaatctcacgggataactaagtagtacttactaaaaatactttaaactattagtcactctgaaatatccaaaccacagaagtacaatgggagcagcaatagtgaataaaaagattttaaatggttaccctataatctgtggatataatgcattttgtgcccaccaaagaaagcatggaccgccaatttcacctgtagtttgtaatttaggcagggttatttatgcctcaatttttatcacactgaattataaaatacaaggtttgattgatgactcggcagctaagagcacttgctacttttgcacaggatccacatttgcttccagcacccacataagactgcacataaccacctataacttcagttccagtgaatgcaattccctcactggcttcctcagataaccaggcacacacatagtacatatacatataaacaggcatctactcatatagataaaactaaatataaaccatatatatatgtatatgtatacatatatataaaccttatatatatatagtgtgtgtatagcatacacactatacatgttacaaatactataaaatatatactatatagtatagaatacatagtatatactatacatactataatataattatttatagtatatatacagtatatattatatatgctataactttattatttaacaactacatgttaagcaactactctataaatactagatagaatactacactggaaataaatagctaaataaaataggtacattatgttaaataactataatatatatgtatatatatatatacatatatatatatattacttgttagtttgaagatacatttactatggggttgagaagatagctcttggtgggataaggtgcttactttacttgagcaagggcataaattcagatccccaacagctacataaaagccttgtgcctcaacagatgtctggcctagtcataaagctggggaaacagcattggactgaaccaagccctctgaatgtgggtgccagctaggaggccaagtcagtctatgggatctctaacagtggagccagtctttatccctagagcacagatggactttgggagcccattccctatggagggatactattgcagcccagatacagtaaggggggcctaggccctcccccaaatgatatgatggactttgaaggtcctccatggaggacctcactattcctggggaagagttgggggatgaactggggggttagtggggaacatgggaggaggggagggtgagggaatggggggggatggatatgcaaataggagtgcctctaaaataaaactataaataagtaaataaataaataaataaagtagagacagccagattctagaagtttgctggactaccagtctaggcaactgtgagctcagcttcagtgacagaccctgcctcaaaaacaagagtgcagaacattggaagaaaatatccaatatcaacttcaggcctccacacacatgtatacaacaaacacataaacacttggagaaatacatttgctatttaaacatcagagtcattgttcttaaaatacttgaagtaaaatattcttacaagttgatgattctgcataatgcgttttacagacttttgacctgacctactggtaggtagacaagatggcacagactcctttcttttggttcccgccaccctactccctctgaatacaactataaattgtggaaacagtgacaagggaaatcacaagaggaatctgataggtgcaaagaggaaggcgagtgaattaggggaccggaccacatgaacagatgagttgcatagtttgtgggcatcttacagccccattcaagaaagatgaactaatgtctcagaacatccaaaagagcagtagaacaatagaaggcatcccaagtaggctaatctctccacacagctgtacaaaagctccactgacaacagaagtgaaccaatagcatcagtaagaaacatctctcaggagtcccactgaggataagccaacaagcttataaggaaagtaccatcctgcctcgctggacataagccacctcatcatcctctgagagacatagtatagcacaggcaaagagtacctggaagctaacagcctcctgacatgggagctcataagcatgggactccttcctactccaagagactccaatagcttctgggatggggagacctaaaatagactttgtcacaagcacccagccctacaaagaatttctgttccccacagatgggggacatgtagttttaataagtttctggcctcagatgtcatttcttccccaagcagacccaagaatccactctctaccatgagatatcaagagggcagagatgttggaaaagaggacatcccaaccataaacacagccaagctacaaagcactctccatctacccatcctactgacacaagacttgctcttctcacccagagccatcaggacacttgacctagaaaacatctgtctggttccttagacagcaccaggaggaaatagtgggacttagcacatcaggtacaccagaactatctttagaaaagaccacaaccactgtaaactaaattgccattaaagccacattctactagagtaggtcaacgccatgagtgaatcctcagcgagcagtcactgcccagtaaaacagaggactcccatgagaacaagtcttctaaaatgaatagagcctgggggctggagtgatactgaaaggattccacaacttgagatagtgagactgaaaaagtagctgaagaaatggtggctgacagtgtcacaaatgaggttaaaatgcagacttacactcatgcagcaaaccccaaataagataagtccaaggaaaatttatgttaacacatgaataataattcaactcaactcaggataattaaacccaaaaattctgaagacaaaggaaaaagtattcaaattgctggaaagaatcagaatttggtatgcaagggaacaccatgacaaatggtggtcattgctgttaactggtggcctcacaggctctcagatttaaggagctgattccttactgggtgactcacatccaataacttggggacataaggactgacctccctgaccatggcattgaaggccctgtctttatcctgactctgaagaggcatttaccttctgtttgtccattggaaacctttgctaaaaatacagcacagctctctgccttctgagtttagtccccttccccagcttatcacaggcttttatacaagaatgatccttaatatcatccaaactgatttctgtctctaagtatgcttgataaggattcaaaatcaagctccatcctggactaactggggagagaaggaggtcacaggcatttaaattctatggaatagacatgtttccttctactatgtgtagtccagggatcagactcagggtggccaacttggtggcaggcacctttacccactgaatgctgatgattgaacccacagactcctagatgctagacaagtactctaccaccaagtcatgccccttgcctttatttgccttcttttttgatgatatgagttttcctctttttatataaggctaataataaatccaacctctctgagcccctaagtcatcctttcaaattaagacacagaaacagctaaaggaaataggaaatttttatcaagagactgaccgtataaatttcttatctgacctaatcagtcagtgcttagccaacaattattaaaattgggtgctgggaggtagactaaatataagtataatattcaaaataatcacgagtagaacattctgacatcactaatttgtataatttttaaagaatggaaatgagcctaagaagtaaaatcccttaagaagagcaatgggcaatgaggaaaacatatccaaccagccatttcaggttacaatttcccccaggtttcttctgaaatgtgcctacttaattgtcctcactgtagaagctttaatgttgttgtgttggggcagagtgagagctttatctcactggttctgcaagacaaccattgatgacagacactggtcaggaagtaaaggatcagccaagccagaaatctcatctttgtatgtatttatataactaaactgacactttatgtactctgtcactaggaaacttgaggccctgatataaattgaaatactttttggatcattactcatctctttaaaaaaaattattctaaatatttttgttgtaactgaataaaagtcaataagtttttataagcagtggcagataaatcaaatgctacaatcatagtgcattagaccaactaggaagttaatcaatacggaaagaatgtctgtaaacccctttggaaagttgaattgctcattttcatttcacagtttctgataagctctggaaataagcaattttatttatcccggggtttaaaagtgagagatgagtacaaatagtggtaccaggaccttcctcctgtctgtcagatactatgcctctgctgttgcagacatgactgatagaccaccatgtcctaatgtgcatcctcatcaaaggaaacttagaaggtccttctcgaatatggcaatgtaacctccccagtctcctcctcgttggccatagtttttatctcaagggaaatgactaaaactatgaagaatgctgtttctgtatgaggaagagaggaggtatgtgcacatgtgaagatctgtctgttgcaaagatgaggcatttaaactgacagagatctccattgaccttgatgatggaatttctctgcttcaagaataaactgaaggaaaagtatgtccttattttcctgtcaaagtcaagagtgtgctttctaaaactttcacagtatcttcactgtataaattttcaaggtggaaaacacagggaaatccagaaactccggagcaaaatccaacctggtatatgaacatttccaagacttggaagccagatgtcatgatgaaacacagttgagttgtcttaatacaggatcaaaagtggtaagccaaagtctggagacagttccctaacactgcaactttaattctttcacaaccactaactatcagagcactacattgagttaaaggagggaaatggactctgatgtcaatctatgatgctttcaccctctggtaccttcaccctcttgtattaaatcccttccttgtggtatttaaacagcatctacccatccttgtaagatcctaaagacaaaccaaagatagattcaaagttcttgctggggaaccaatgagtttattggggttgcttatagagaatatgtgattcaaaatcagccacattagaaagtctcaaccagcgtagatgatagcttacccacagtcaaataaaaagagacctggtcccctagtcccaggttacatactctaaatcatcctggagacaccaaggtcgtgtgcaattagggcagaattgcatgcaaatgctggggggaaatggctgcatacttgggtgacaccctctttctaggagggaatgtcagcagtgcacaggcctaatcattgtggactcttgtaaataaacacaggtgatctcacgaagatgatgatagtttgactctagtagagacagttccctacaacatcctctatgctgtcaccctctgatgaattcacttctgctatcttcatcctctgaggccatcaccctctgttggctcaccctcttatgaattcaccctctgttgacctcaagttctgatgctataaatgatgtatttttaaatattcatcatgatctaactctgaggtcatagaaaattgggagcaggcaactggaaaatcactcggaaggtagagtctgattagacaagtgtaatagctacaaataaagctaacagaaatcagagacaaaaaactgaaaatcatagaaccagataacagcctcatatgctagttgaagtgtaaaaacaataaccccaagtcttcaaaaactgtatcatttgagtaagttcagtatcatttgcttaagaccatgaattgggtaatatagtttagaaatatttctattcaaaataatttacattttataatatttctctttaatctatggcccagattttataacctaataactataagtctgcaaatgtctaactgtaaacagaattctaatttttgttacattttgttaggaaaactgatccccaaattattttaacaattcttcaaaattagctgaatatacttctttaggcttgtgtgtctttaatcatgaatgatgagagctttttgaagtatctgaattgcttttagtgagatttgcaatcattctgaacaaattataaagccacctagaataatgtactgtactatattaatgcattcctaaaatcagtacattgaacaaagatgattacaaaagtgaagtgtgtagccttattcactcttgggatctattatcagaagaccaagaataaaactaaagttctctcaacactcataaaaggctgtgatcttaagactgtttttttaacctaaattgtataaaacatctaagaacactgaagcaatccttactaatatgtcattgcttggcagacaatgtatgtgaactgtagctttgaatatggccttaggggaataagaggtttctttaattcacttacattaagagaattgctgcaaatgtgtgctattgttccccatctcgacaccatagtaattaattatataagccagtgttaccccaagaccgaaacaagataacttttacattgtacatgggcccactctttaattcaacagacctgtacttattttaatatgtcagaaatacatttgtaaatgtataactgcatctactattacttattaagaatgcaactttttcacaaagttaccacattgatttgtattatgagtgtgtggtgcatgtgtgaaggactaagaagaatctgtgggaaatgaatccttccttctacaacaggggacccagggattaaagtcagctcatcaacttgacaaaagcatgtgaacatgctgagcaatgtctccagctcaaggaagtaacttttaaaaattaaaaatctgaagtttaaatttaaatcattaaagttatgttaaagaaaaaatgtttcatttattttaagtaaagtattaaataatctgaataatttaaaatatggttcaaaactgaatgaaggttaaaatttcatacattctatttacttagaaacaagacatatcctagtatatggcatttaatttatagctgttttcaactactgtttgtgtcttttatgcactaaatattaacttttgctcttgcttccaactcgtttgtaagcaggttttcttttttattagaaagaaaattaatttacatgtcaaccccaggtccctctccctcccctcttcccctgtcccccccccaactaatacctaatcaccccataccctttctgctccccaggaagggtgaggccttccataggggtcattaaaatctgtcatattctttgggatagggcctaggccaacccccttgtgtctaggctcaaggagtatcccaccatgtgggagaggctcctaaagtccattcctatggtagtgataagtactgatgcactacaagaggcctcatagatttccaaggtctcctcactgacacccacattcaggaggcctggatcagttccatgctgttttcccagtctggggaacaagacttttcccttgtttaggtcagctgtttctgtgggtttcactagcctgttatggacccctttgctcatcagtcctccttctctgcatctggatttcagttcagttcaaggtttacctgtgggtgtctgcttctacttccaccagctgctggataaaggctatatgatggcatatgaattagtcttcaatctcattatcagcagagggcatttaaggtagcctctcctctgttgcttaaattgttagttggtgtcatctttgtagctcttcagacatttccctagtgcctgatttctctttaaacttataatgtcttcctctattatattatctcttatcttgctttcttctgttcttccccaaactcaacatccctgtcccatcatatcctcctcacccctcctcttctccccttctcattctactagtttcctcccccatccccccatgctcctaatttgctcaggagatcatgtcccttttcccttctccaggggaacatgtatgtctctcttagggtcctgcttgtttaccagcctctctggcaggctgggattcaggctatcaatcctttactctatgtctaaaatccacatatgagtgagtgcatacaatgtctgtctttttgtggctgggttacctcactcagaatggtttcttctagttccatccatttgtctgtcaagattccattgccttttttttttcctgagtagtactccattgtgtaaatgtaccacattttttctatccattcttcagttgagggtcatctaggttacatccaggttctggctattacaaataatactgctatgaacatagatgaacagatgtccttgttataggaatgtgcttctttggagtatctgtctaatagtggaattgctggatcttgtgatagactgattcccattttcctaaggaatcaccatacagatttccaaagtggttgtacgagtaggcactcccaccagcagtggaggagtgttcccctttctccacatcctctccagcataaactgtcatttttgtttttgattttagccattctgacaggtttaagatggtatctcagtgttgtttgatttgcatttccgtgatggctaaggatgttgagcactttcttatgtgtctttcagccattttagattcctctattgagaattgtctatttagttctataccccactttttaattggattagttggtgttttggagactagcttattgagttctttgtaaattttggagatcagccctctgtcagatgtggggttggtgaatatcttttcccaatccgtgggttatcgttttgtcttgttgactgtgtcctttgccttacagaagcttctcagtttcaggaggtcccatttattaattgaggatctcagtgtctgtgctactggtgttacgttcatgaagtagtctcctgtaccaattagttcaaggatatttcctactttttcttctaataagttctgtgtggctgggtttatgttgaggtctttgatccatttggacttaagttttgttcatggcgatagacatggatttatcggcagtcttctacatgccagcatccagttatgccagcactattttttttattagttcaaattaggaacaagcttgtttcacatgtcaatcccttctccctctcactctcctccctcccaccccgaccacctaccccccccccacctaccgccaatcccatccaccctccactccccaggcagggtagagccctcgattagggctccccaaagtccaccacataatcctgagccaggcctaagccctcccccatgtgttcaggctgagagtgcatctcttcacatgggatgggctctgaacatcccttcttacaccagggaaaaatactaatccactaccaggggcctgctagagtgcagaggcctcctaattggcatccatgttcaggggtctggatcagtcctgtactggcctcccagacagcagtctggggtccatgtgcttcctcttgtacaggccagctgtttctgtgggtttcaccagcctggtactgacgcctttgatcttcgttcctccctctctgaaactaagatttagagttcagtttagtgtatatctgtgggtgtctgtctctgcttccatcagccactggatgagggctctaggatggcataaaaggtagtcatcagtctcattataggggaagggcatttagggtatcctctccaccattgcctagattgtcagttcgtgtcatccttgtacgtctctggaaatctccctagtgccagatctctcctcagacctataatgtctccctctaatatggtatctctcgtcctgctctcctctattcttcccccaactcaatatttctgcccctccttttcctcctctcctcttctcctcctctcattctggcagctccctctcccctaccctcatgctcccaattagctcaggagttcctgccacttcccattcctggggtccatgcatttttctcttagagtcattcttatttcctagtttctttggtgaagaggattgtaggctggtaatctttgctgtatgtctaaaattcatatatgagtgagtacataccatgtttgtctttttgtgactgggtgacctcactcaggatggtttcttctagtttcatccatttgcctgcgaatttcaagattccattgcattttttctgctgagtagtacaccattgtataaatttaacacattttctctatccattcttcatttgaggggcatctaggttgcttccaggttctggctattacaatcaatgctgctatgaacatggttgaacatatgtccttgttgtatggacatgcattatttgggtatatgcacaagggaggaattgatggattttgaggtagactgattcccatttttctgaccaaccaccatactgatttccaaagtggtcttccaagtttgcactcccaccagcaacagaagagtgttcctttttctccacatcctctccagcatagattgtcattggtatttttgattttagccattctgtcaggtgtaaggtggtatctcagagttgttttgaattgcatttctctgatggccaaggattttgaacacgttcttaagtgtctttcagccatttcagatttctctgttgagaattctctatttagttctgcactccactttttaatttcattgtttgttgttttggtggctagcttcttgagttcattgtatattttggaaatcagccctctgtcaaatgtggggttggtgaagatcttttcccattctgtgggctgtcatttgtcttactgactgtgtcctttgccttacagaagattctcagtttcaggaggtcccatttattaattgcagatctcagtgtctgtgctattggtataatgttcaggaagcggtcccctgtgcccattcgttcaagggtatctcccactttctcttctagaagattcagtgtggctggatttatgttgagatctttgaccatttgcacttaagtttgtgcctggtgacagatatggatctatctgcaatcttctgcatctccgaattcagttgtgccagcaccatttgttgaagatgctatctttcttccattgtataccatttgttgaagatgctatctttcttccattgtatagagttaccatctttgtcaaaaataaggtgttcataggtgtgtgggttaatatcagggctttccattcgattctattggtctacctgtctatttttgtgccaataccaagctgttttcaggactatagctctataatagagcttgaaatcagggatgatgatgcctcctgaagttcttttattatacagggttgttttggctatcctgagtcttttgtttttccatataacgttgagaattgttttttcaagttcggtgaacaattgtgctaggattttgatgaggattgcattggatctgtagattgcttttggcaagatggccatttttactatgttgatcctacctatccaaaatcgtgggagactttccattttctggtcacgttgaacatgtcacacaggtatgggttatatgcacatagctttagattcaactgtaacgtgcttacaaagattagttaatggcagtctttctttctttgacccatcaaaatcagcctttctgacacttattccaatagtttttcaggataacttgctcataagttatttttcatataaaatggcaatatataagataatcaatataaaattataaagcaagatcatgtttaaaatgtttggagcctttcaaaaagaactctgctatagtataaaaatacactgagaataaatgaaagtttcaatatgggagttactgacttcttcccagattagtttaatggaaacattttctttattataaaatgagtagctaattggggtgctaattatcaatatataacattgcatggctaaagcctgaaagaatacaaggaaaaaatcacattttagtatgtatcatatgcaccagcaagttccaatgcgaagtaccccaagagaatcaaatgaagacacagtaccaggcagtggagggatggagaaaaagaaatcatgagactgctccaacaagcagctgagtggtggctccaaatcatttcacttctctgagccttggcttccttaataaagaagtcacttacattttttataaatagattctgataataatcaaagatggcagggcagaaagagaaatacagccctgttatgaaacggtattactaagaaactaagccattgcttttataatctagtgcagacttttgattatttgagataaacagactcctatattttgtcactattaatttgaatttctgctattcgtagctaacacatccctcaccagttaaataacacagaaatacattcatatatacaaataccacatacacacatacacctcccccacttacacacacccacacatacataccacacacacacacacacacacacacacacacacacacacacacacacactcactccataagggaaatagaatctgtatatctgattacgaataatctaaatatttgggaagtgaaaaatgaataggaattctctgtaactactgcaaaagataatctatttactatgcagatcattcaaagatattaacaagaaaacaaaggacaaataagtgaattaacgaacaaagaatataagcaggaaacttacaagaagtgtggagagttttgaaactacacagcaatcgtctgtctttacaagagatctgacaaaccaaatgacaataagaagagaacacttctggttctgcaggttacaagaaactgaagtctcaagtagagtgactgtggatgaacagcatttgacaaagcaagcactaccacatactgctaataggaatataaaattttatgacactttaggaaggccatccagtgacagtgaaacataaaggtgatatggttgaataaaataaaatataaaactcctttctaaatagcataagatattaaaactattcttatgaattatatatactaagacataccaatcatatcccattaaatgaaagaagaaaatataaaatttaagtactttaaccacaagtatatttttaattacttgggggaaatggaattaacagttagaactggcatttttaggtaggttcttttaaaactctactgagctctgaaatttctacttagaatgaagtctacaattattctacttttaaaaataatgtaagataagttggagggtagaatgagggctgctcatggccctagcattaagcacaccaataacttcatatatgcaaagccttggacccgctcgccatcattgcagcaagctgcctgtagctgagtttcacggggctatgcatgtaaagatagattccaacaaaattcctaagcagctgcttatataatgagatcagatgaacatgaaccatcacatgcaaggtaagtaggaaaaaaagaaaaaaaaaaaaaaacatttgaaagccacacagtcaaaaagcctgaagcggcatgtcattaggagatgacaacagtgatcaaagatagatggcaccatttgaagacaaggactcgaaacccagagagctgagtacccacaagcatcagagaggaacaacatcgcaaactgctgacacactctaagcatcctcagggctgaaaggtacaagtcacatgtaggtcttggcagtttttatgtccaagggaatgcaaaacgccatcagcattgacatcgatgagtacagacagacatgatttttgtgttagaacagaaatgagctctatctatgtttgagcacattttcctttaaaaaccctttcttcagaattaggtattgtatttctcactacttgtcctaaggacctagataaggtaattgaaatcaatagctgagaaatgatcccaaccagttacattctgcagatgcttgcagcaccaaagctggggcagagtccatcacaggaaaagctgtttgtgaccatgtgagaagaaaacctccacatgtaagaggtacataaaggagcaaatacaaccattttcaaggcaaggaattaaccagaaaaactaggtaaccattccagataaatctaaatgtgaaaaaaaaatccatttgaatcaaatacaagttattcagtttaccaacagatttgcaacaagattgtataaaatgatagcattcccagatttaaaacttcccttttattttttttttttctgctgggcagtggtggtgcatgcctttaattccagcactcgggaggcaaaggcaggtggatctctgtgaattcaaggccagcctggtctacagagcaagtgccaggagaggctccaaagctacacagagaaaccctgtctcgaaaaacaaacaaataaacaaaaaacaaaagacaacttcccattttttgcaaatgcacatatcatatacagggctttcatgagaactccacaattctatcctgacatgacacagtaggacactcagtttcctcaaagaagagactgttgccagtaattgcctgccttgcctgaaggcctttctgtggcttccagccccagtttgtctgtcacgaggcaggtcagacatggctcagaacctgggtgcggcagggaactcttggaacaaccaaatcactgcagcagttggtgcataactatcccagtgtctcttgttgtacattgtctcctagagatctgcaggaggactgtgccccagtgacccacagtggtgaacttcttggtaataacactttatgatcctcattgccttttgtccttcctcaactcctcctctccccaatgccccaaactgtctaggatcacccctgaaatcaactcctttcctccagttctctcatggtgtgttttgggagtaactgggattaagtctcatctttatccttctgaggcgtctctgtcaactcctctcatctgttgatgtaacgtgagcatctctgccccccttttctatttaccacaaagaccagtcaaaacatctctttattcttatttttgtatctcttataggcttaacttgcttgaaattccatcctgccttctatctcctttttctaaactatgttaatatttcttaacagtcagtttatcaagaatgtttcaaagttaagagaataaaagttccctgtatcttcaatgttagccttaagcatccttatgtattgcatagtatttaaatatataaccaactcctgagacgtgtaacacatatataaatgaattatggaatcaaagctaaattacaaactaaataccaaacctacaaatcaataaaatttaaattaacattgattctatgcaatttttgcttctgctaactactttcattaatatataaatctagcataaatgtataccagtccactccttaaggtgatgagagcccattacccctttagttagcttcatcaattggaatgttttgtttgctcaatgtgggcattctagcagaccatatggggatcacataactgaatgtagcagataagaaaaagttggcaacagcaaaagatttctgaaaggacacaaccaatgcttaatgcaaaatcaaaagcataatgaatctaatgtgtctctggcaactgtcattcatgctgcatgccatgatgtcactatagcattgaatctgagctcacagaaagcactgtttgcacaggcatgtcatcacaccatccaacagcaaagaactgacatagacacctaagctcagagtttcagtgttcctactttacttctcatgtggaaacatgatggcttaattgcagaaaacaaagacaaaatattttctgactttcattcctcagtatgaaagaaatcagtgtatctttgcactgtgttatgctagagtgtttgatttttaaaattgctgcttgagagattggggttttttgctcacttgtctagcaagcagaaggtccagggttttatctcaagcaacagaaaaaaaaatcacaataaaagtgtgcggcagggagagaataagagcttctctttgagttgttgccttgactttatttaaaaatcctcagtgatttttggcttagagttaaaacataatttccaacaattttagaaatggctctagacatacttctgtcattttgtactacaaattgattcaaagtggtgtcagcactgatattaaaatcaaaatatcaatcaatcagttctgaaaaatgttgaagttgctctacatccttggtatcaaatattcagccaagacttctttatgaaaaataagcaagcacattcgtctcattgtataaaatttactttgtttttgtctttaataaagggtgacggtatacatataacaagtaaatgtccttgtaacttattatcactaaatatttatataactgttcgtatgcctacatatcaggaatcatgtgaaatatctctgggtaaaggtatcatgatctgaaagttgaggtcctggtactttctgaggtggacctcacacaagaaacatgttttgttttcactgggctcatgagtgctactcagcacaaaggtgcttatcgtacaaaaagcaaaacaaaaccaacaaaatacaaacaagctctgtgggggtgtggctgtcaaatgatgtagacaatatttatgttactttttaatgctgttaaaagaaatagacattttaagggatgatgataaatactgatctacatcagaggactagcagttattaaatattcctgttgcttatttgttctttcctatttgtttgggttattttttaaccaattttctctggctactcattacatacctgtgacaaaacctgatattgtggcatggagtgtagcatatcccataaggctgccagtcttttcaagacatcagagtcatgccaagcacacagaccagtctatctgcctgatatcctttcttccttctgtactttcctcatactgatgtagatacctaccaactatataatttgcacatgctgcttaagctctcagaacctctggttagtaaaatgaccatataaaaatgctcttaggagagcttacaaatatcaattcagacagaattcacacaatatgctcactatcttgagttctccacaaatggcaagcattgtcactgcttgtaattcctttagtgagacgaatcatttccgcatcattatagtcattcagctatgtttacactttgactcaccagtttgagtgatatagatatttcttaaccaggcttcatgcaccgctctcacattcaggccagttttctgggtctggtataaatagtgcctggcatgaatcagcatgcaataaattacttcaactgaatctcaaatcatgtgattccaagcatggtataatgaagaatttagtgggggctcacaaaacaaaaaaatctgttgacagatccattatatgacatgacccaaggaagtgtgtgtgtgtgtgtgtgtgtgtgtgtgtgtgtgtgtgtgtgtgtgtgtgtgtgtgccaaactattataatatgttgagccatctattctccttagagcaatttttttcaatttgaatgaaaaaaatttgaaaaattctttcagtcttttaacatacactggtaatgtccttcttttctaaagaactcaggtaaggtgaaaaagaagagtggaagaaagaaaataactcactagctactgaagacctagaaagtctgcatgcttcctggatcttcatcaagcagaatttcaactcttcccctatgctgtacaaaagactctttaagtgaggtgtttcatttatagattcatttgtgattctcaaactgtttgagattgagagtgaatacaaatcaaaaattaatcaatgaattaaagctctctgttactctaaaattcagaggagtgatatattcaaatatcaggactgaattaagaataagtaatattagaaaatgcatatttactgaagagtaatattttcacttatgagcataatcagcacaaaaatgcatgatgagatataatcatgtatgtaaatcatgggatctattctgaaattaactttgtatttgtctcccatagctatttaatttttctcaatttactagaaaatgaaaatttcatcccaacaagcccagtatctctgaacatagttaagtgttgtagaatatgaattgaagatgtactacaataggctatgctgtggaatatttgcttaatgatgcaaagacgtattgcattcttttgtgttgcatttgtttaattctgtgaagctgtgttactttgcctgcctaaaacatctgtttggtctaataaagagctgaacagccaagagctcggcaggagagggataggtggggctgccaaacagagagaagtaatagaagaagaatatgaaagggaagagcaagaaaaggaggagaggaggacatcagggaccagtcacccagctatacaaccagcaatggagtaaaaataaagaggtatataggataagaaatggtaaaagcccagagacaaaaggtagatgggacaaattaacttagaaaagctggctagaaataatccaagctaaggccaagcattcataaaaaaaaaaaaaataagtctctgtatatttatttgggagctaggtggtgggctcccaaagagtaaaggagtaagaataaagtaataaaatagaaataaaaacagttaagtaataaaacacactgtttaagagggattcccaatttagtatataagagttctggttgaaaataagaagtaactgtataatcatcactcaaaggttagactgctctgtttctcctgttgcgggtctatagcaaagttatgtgtctgtggtgtaacagaaaggaggaagctgggattgcaagattctcacaggaattcaggccctgtttagctcctattcccatggttacctctctctcttatccctccctctttccctccctccccctgcttactctccccatgccctcttactctctcctctaccttctctccatatttgcatgagtacccacatgtttctcctacaggttcttgtgacaactccagtgactggcatgattcatttgaacacacagttgcttactccatcaccaccacacccaccctcctgccagctttctggtgatccatcctgcagtgatatcttgcttgtacaaataaagccagtctgaaggtcacagagtggagcttgccactagctaaccatcaaggtctggaggtctgtacagacagacaggaagtgaggaagctgggcagaaacaggaactggctctctggtctgctgagacttgaaggggctaaggtatggtggtagcttgttccctttctctgatctctcagcattttcctctatatctgactccaggtttttattactccgaccaattaagaactccatttacattttgctgcccagtgtggccagaacattaacagcaggacagggacaaatcactgtgaatatatgtttctcttattggttgatgaataaatcctgattggccagtagccaagtaggaagtattggtagggctaccagatgaggagaattctgggagtaggggagagagagtggtcgacagaggaaaacaccatgtagccatcaaaggagtaacatgctgaagcattatgggtaagccacagcttcatgtcaatacatagtttaatagaaatgtgttaataattaagagagagctatccaataagaatcctgagccatcagtcaaacagtttatgattaatataagcctctgtgtgtttatttaggactaaatggttttgggactgggtggaaagagaaactctgtcttcaaaagaaacttcccatcttggcagccttctgcatggagaagtaaaattgcttaggacactgatcctgtagttgaacctgcttggttctttgtagataatccacttacttcccagacacagccctccatttagcttccaaagacaattcttgatggttttactcaggaaggcttcacactaaatccaggggaaacaaaaactcagaatggcctcctttgaagttcccccaagatggtgtgttgtgtgcattgatatgaacaaacacacacacacacacacacacacacacacacacacacacacacacacacacacatttttccctcatcttcacaaagtcttttccctaagaacctgccttctttaatatccttggcgggagatgaaacccattagttaaatgtttcctttgaaatataaaccctgatatctcacaattcattttgttatcttatattgactctattttggttactcagataaaactaaactatatgttgtagcagaacatgatttattggtctcattttgcctgaacaagtaatctttagcaggttgtaatgtaccaacacattgaagtcttaattcaggttttgtgcctctttgtgaaatatatttaatcacaattgctacataactaagtgtgtggtggaatttcttccaatttgtaagaattataaaaagctccacagttaaatacccatagaaaattattacataaataaggtaaaataatttatcacatctgttggccccaaggtctcattctatcatggtgcagtgatacagaactagggaatagtgagtagttttgcttataatttggtgtgtatgtggtacatcctggtacgaaagcagattgaaagctgcctctagatgagccaatgaaggggagaatcaggaacttaaaagtagacttcatctcccagagagatatggaagaagttaggatacttcaaaaaggcatgaaagaagtgatagaaccctataaaagatgaggggaaacaagaaacccagagaagctgcaccagcatcagagtacctgctggagaaatgggaagcaggatacaattgcaaaagatgaatcagaaggaagcctgataattttacatccagggcaagcccatagccctcagaagcatcaaatctaactgcccattttaatgagggaagtgattcttcctgggttggcagtggagtgaaatcccattccatcacaccacgtgactgggaggacaacagctgggcactatcttgagaattaaccttttatcaaaaacattaggtaccccagaaatcaagttggaactgagctggaagcttcttccctggtggctcatgtttataggaccaaaagttttcttcaggctgtaaggaagaaaattcatctgtggtctcatgagctctcaaatccttgccacaatgtcaacttgtcccgcaagacatgttcacctgtgcagtagtggcacaactgtattgggctaaccaactgctttgcaattggattacagactctctccatggttgggaattcacatttgttactataaacctagtcaaaaacataactgtggaggatatggagcaaagagagggaatgtgtgcctattgtttcactaaatggacatatgttttcaaatgtcattttaaatatttgtttatatacatggtctagtgttactctcagcctgagcagaaaagctcttttatgtagaagatggcatttaatcatacctggtcaaagtgccgagaataagtgaatggtatgtactcagcactaaaaagaacctctcttcaaggcccaggaaacatagaagaggggattgaaataatgtagaacatggtagctaggaaagagttttctaaactgctgtcatctagggatgacacagccattacagtggatacataaactagaccattgggtcatttaaactttcatagtgcacatattcttgagacctcatccctttctgggtgatactgactgttaatggttgctgtgggatgtcatatttttcgacaatgtagatgatgggaacatagttaaagaaggagggcttcagatgaagagaggaaggacaacagaagttaatatagggtgagtgtaataatagtgattgtatatatgtatcaaaactgtcataaacttctttgaaattatatctcacctaactcaaaatggctatcatcaaaacacttatgacaacaaatcctggtaaagatttggagtaaagagaacctttattcgaggttggtgtgagcataaacttatttagccatgtggaaatcagtatggtggttcctcaaaaaactgaagctagaactgacatatgacccatctatactggtcctgagatatgtcacaaagatttaagtcaacatgccacaaagatatctgcaaatccatgtcaattctgcactactcataatagccaggaagtggaactggcctagatgcctatcagtggatggatggatttttttaaatgttatgtaaatagaaattaattttattatgctgtaaaaaataaaatcacatttttcaggaaaatggatgccaactggaaatcatgctaaccaaaataagacaaatcagaaagataaatacctcttagactttaaatgatgtatgtatacccatttatatgtatatgtgagtcacagggataaaaagagtccatgagataagtagaaaataaggcaattggaaacatgttatatgcaagcagaaagggggttaactaagggaacacaaaggagaaaggggatgggtaattaatgcgactaaagtataatgacatgtatatgtgtgcatatgttagtgtatgtgtgtgtatatgcataaatgtcaaccaaaaatgaacacaataaataaaaatctttttaatttggggaactaatgttgagatcaaataagcaaatgaactgaggccatctaactcagaatagggtccaaacacttccctccagattccccatggccctttgagaagcactgtaatagaggaaatattgtctacctcttcaaaagttgagaggcagtgcctgtctaagaaactatgctctaaggttacagtaatctggctaaaatcttggtttcaagactacacattaggtttcttagtctgtctgtgtcttaattctctaccctatgaagtggttttttaattatcttttagtttatattaagtacacagaataaattgtgatagcaggctcaccttacccatttactagaaccaatgatataattagcaaactgcatagaccttgagtattgtgattccattaaccactaagaaagaagagaatcaaaaaattagaagtttatgcatgagaaatgatataaaggaaggcaatacaaagctcggcaaaaaaaaaaaaaaaaaaaaaaaaaccctctgggttaatcataagcaaatgagtagctgcttagctgcttattcctgagcccacagattactcatcccccaggtccatgtcagaactcaagtatgactaaattccaggcagtggactatgagtgagtacatagtcacagatacatcttataaagtacatgaatcactaaccttctatattcttttccctctccactggaaatgtgcgggatggtgggtttgcactatagaaagccatttataatttcgggggtgggaactcccattctgaattccatgtgatttgaaaggagagatttaaagtgtggcaaactaattggattatgagcaccatcctttacagcaacaactggtaagcatgaaacatgctagaattgggggcctagaattttccttgcgatgatgtttaactcaaatgacaaatactgcagaaaagaagaaaattttgttttcatttttggttttttttttccattcttttcttcccctcctaggccgtggataaaactagtccagatcagaggaaaagagctacactgcatcacatgacacctaagaggtatcaagttctggagagtaaatgagtagaggaaacatgtcaataatcttgagaaagaaaggcaacagccatatgacagaaaataacatcattgcctcaaccttcctgtaaagaatgatacacatcaatgccttgtgcaatgccttctgaaacactcaaaagaaagagagttcagcaattgtcttaccatatattcaatcaatatttaatgagagtgctcactccagaccagatacttctctagatacagaatatatgttaaacaattgctaaacctctcttttagcttacatcaaattctgtcagaaaagagacaggtgtggctaagacagaatgagccagaaagaaagtataaagatgagattggaaagtaaagtatggtcaacttacccaggactctaaagcatgtttctaaactgagagacatgggcaggtgaaggctttaggcagggaaatcacaggctctaacaaaactttccttaagaacactttggtataaggaggcaaaagtctataataaaaacacaccaacatgctatgcatgtttgtatccttagaacaccaggctataccacataaacatagtgggctagatgtatcatctacttatatataagaaaatgcctagccatgtattttccacagcatatgccatctttagggtatttgtgtacatgtggttgtgcaaatctccatgtacactgtctgaaagaaagatgaatcaggtcaggagtgctcaagcattcctactaaatgcttgatgagaatggtcacagaaactgattagggcacatacattggacattcaggctaaaacataaatcaagagatcaccagggaatgagtatggctggaaaataaaagaggctaggagacttctgtgggatattccaggtttttgaggctgcaaggctgagaaggagccaggagacatggctaaagggcagacagagaacaaggaggaacgctgagtgaatgctgtggcctagaagagtacaaggagacaagggtggttgctgtatgcagtgctgactctgcatcattgcagatgagcgctgagaaggaataactcaggtcggcaatcgaaatgatctggaaactcaaaacacaagggaacacattatgcacgactctccttgataaaaataaaggaatctcttgaacagtgatgatcactttctgacaggattataaattattctaaataatttcattctcttttacttcatgtactaaaatattgtcctcattatcaattgttgtacatttaatgaacagtattgaacctaattataaaatatattagtcatattgcagtttttagagaaagttcttgagatttggctgatcaggacttgcttcagttaaataattgtaatgggtgtataaattgaaagttaagcttcctccctatatgaacaaaaatctttactataatagtacttaccatttagtgaacactcagcatgcactaactctggaacatatgtcttgggtcaccattttttcaccagataataattctgcaggatactttctatggctattgccattttaaagtagaaagaacaaggattgacaattcattacttttcccattttatccatttggtagctggttggaccatgattcaaaattgttccatgtcatacaagtatgacggttatgtcatgataaattaatacataactgaacctctatgactttgaccaataacctacccatttggtcatagtgacatctaaagaccgcagatcttacactgtttcttcttcctttaatctcccagggcagaccattccccagtttctatgtaccactgcaagaccaccaaggagtggtggggggtgtcaggattcaccagtaggattgattccactttgctgtagatatatataatttttcatttgaatcacttattaggaggacatggtatgcacttgggtgagggccaagaaagtccaggctacagtcttaggacacagggagcagacagcatgcccattgttctactgaaagaacattaagaatcagagttccaacaggcatttagagagaatgcaaaatatgttcatgttcactctgaacactcctgcacctaaggctcagggaacattgcagaagagggagcagaaaggatccaaatgagccaaagcaccatgggagttcactgtgacagtgtatctcctggtaacatcagacccataaagtctgaccaacatgactaaacattgtgagccaaagaggaagaccccaatggatatgccaaactgaatggaaaaaaaaagattacaaggcctcaaccctacatcaagaaccataggcaacttaggagagctggccatggaagaaatactctttcccaggcaatagcacaccaattatttatccaataacaaatggtcagccctgaaaacatacatacaagtaacattaaacagactgagaatgttatatttagaaatgtatataccaacaattaatgcatgtaacaacaattaatgaaaaagagaggccatgaatttgaaagacaggagtggtatatgggagagttttgagagaggaaaaaaaaggaggaagtgatattgttggggcccatagaaatggatcctcttaggcctcaaaaatctatggggtctctggtagtggatcagtatttatccctagaatacgaatagactttgggagcccattacacatagagggatactctctcagtctagacacataggagagggcctaggccctgctccaaaggatatgaaagactctgaagattcccccatggaaggcctcaccctccctggggagcagaaaggggatgggctagggagttagtgggggacaggggaggagaggaggcagagggaattgggattgacatgtaaagcaatcttgtttctaatttaaattttaaaaaatggaaagaaaaaaggaaatggctcctcttcatcttgacttaaggtcagagagttcaaacccactattgctctctcaaggttaaacagcagaatgtttggcctgaggtatggctaaactaatggatgtcttaccttgacaacaggatattttgcctaagaagtaactaatggatgttttactttaaaataggatatttagcctaaggtagttattgtgtattttgccttgacaacaggtatggggagagcaggagagagggaaggagggagaggtttacatgatgtcataaatgtcaccacttttcagtttgacataaaaaaatattggttctataactcataactaaacaaagccattgacacggttttgaaatccattaactttttatctgtctgacgtaactgaattatattttctttgagtccactagccaattcttcactgagtaaaccatttactctctactattatataagatgagtttgtatttaatttagggactcatatgtgtagcaaagtatgactgtagtcagagtatggccaagcaatctgcctatcttaggtggagtctgcccaggattaggtgaggactcccaatcgtacaatgccatcccaagcaatgtttcccctccctccctcttcccggttcctctcctacaccttcactttaaccacctcacactgcccctccgacacacacaaacacaaactgtttctagaacactgaagtgaataattaaattatcaaattataaagcagtaaaaatgacctaaatgtaaaaatccgcctagtatttaattttctctatgtataatttacttacatcctgccttccccatatatgcatatgtgtgcaagttaatgtgaggatgtgcttgcctgtgtgtgagcatatggaagccagagatgaatagcaagttatcaggtgtccttcctccagccctctccacctttccctctccttttctttcttttttaaacacagtctctcagtaaacatgatgttcactgttcagcttaacagggaagggagcccctgcctcccctcaatctccagttctaggcttacagacacactcctctacacccagtttttcacatgggcactagaaatctgcagtcagagctttatgctaattcagtaaacactttatcctctgagccgtctcctaagcacttcatttatacttttctttctaatttctattattctggctcccaccacactttcagtcacatcattgtctgtgagttttcactttagctagtgttcttagaactcactcacttccagatgcatccattattgtccacatcagaatggaatacctgctgatgctggtgatgggaactagccaggaacttagttagcagttcttccttcataacacttctgagtctttcattactgtctgcatgaagcatgaagcaacatgaagagtaataaggcagtgggcacttctaggtcttgtgactgttggaaactatcctcgaaatctctgccatcatattttctgctcttgtagaccacatgaatctatgtaatgtagtaatggctctgtctgtgaaagacagatgtcctaattcaacatttaatcactggaagggacactggaagctgagaggatgtcagtattggagataaattgtagtcagagaattatctattccttccctctcagtttgcatagggccatcagatatatacctctctataagaacccatacccaaacgaaaaacttgaagtaaaatgcatctgttctttctcaggatcatgtagaccagcaattctgcacctggaaagttgtgatctcatctgggatcaatcaaggagctgtgctacagtaacctgactgtcaactaggacacttcagctctcttccgcatggtttcccatctgccagtagactaaactgaacatctttacacagtgattccagagctggattcccataagctaaaaatgagagccgaaagtctcttgaggtctattatagatgttagataaagttaattctatcacattctgttcatcaaagcaaatcacaagaccactccaaattcaaaccatagccacaataacgtacatgctctctggctaacccagaaatacaattgtccaggatgtgtcctatccaaagatatctggccaaaaggacaccaagccatgtgtccaacaacaggattatatcctcaagagaaagacatctgtttgtaatctgtgcacaagaggtcagggactagagttaatcctctcagaggatctagatatcatatctctgttcatgttttgtgctccctaaactgaccaagtgggcatgggatactaagtttcaatatccttgagactcagaaagagctgctataatttctgtagtgaccatcttctttgccataggtctatatctgggtcaattctgtggaaaagtggctcaagtgcctgacaatcactaatcatgactcatctgaaacctctcatcttctctctgttctcacagaaaatcaagtgcatttctttatcaggaattacataaagctatagagaacctatcaaaccacttagctgttcacaatttataaatagctaccttctagtgaacaattatgattaaccagacaaatttctaaatttctaaatatattaattatatttagataaaacccagaaaacaagatgttctatatagaagccaaatactagcatcactatcacctttaaaatcctccaatagaataaacttcaaagtccccaagcatggaacatctatgagagtcttaaagatgccctatgagatagacctctctttaagtgtgttgaggaaagaactttcacatctggctctgactcatgtactccaactctcctttatcagcactccatgccagtatgaaaatgctatgagttgctgcctttgcaatgtgtctgtggtgccctcttgaactggaaaggctcttctttct

SEQ ID NO: 8 - DNA, 24895 bp, Cricetulus griseus
  >scaffold_3 dna:scaffold scaffold:CHOK1GS_HDv1:scaffold_3:22455362:22480256:1
  misc_feature 4526..4625: /note="n is unknown"
ttatatgtgcatgcatgtatacacgtgttggtgtgggtgcttttatgtgtgtatatatgtgaaggccagaggtcaacttcaactgtcattattcaagagtcattattcaggagacaggcctgtcattagcctggagcttgctgagtaagctaggctggctggctccaaagagtcattgtcattgcctccacaactgtagattacaagatgtgtcaccatgtctagcttttttgggtgggttctgggtaccaaactgggtcctcatgttcatgtagctagcaatttgatggatatccccatccctaaaataaacttaggaatttaattaaatgtttgatttgtatagctactttatttacctatatacccaaagttaaaaaaaaaattctctggagaaaatgggtagcctgctctaaagtgtgcttcatgcggagaaggaaagaatgcctcacaacaatcaataagccatcattcccagcccactgctgttcaggtagcaaatcgcatagtgctacagtataaaccagacaagccaactcccaaatctgcattgtccctgccagcttatcatacttctgctgaaaaatcaagaaacaagtgaaggatagattacaaacacatgtggaatctacaaatttcctgtacaaggaaatgcattcattgtatcaaaagcttaaacaatggacatccttttctgggtcactgactctaaacaaaagaatcttccaaggatatcacacaagaatcagtttagtggtgttgtttgttagccacagcactcatacagcacaacttctaacaggcaaatatttaaaacaacttaaattcttaactagtttaatagagtaaggctcgtcacacaatacaatggcctactgctattaaaatgatgggggcaggggctacagaaatggctaagtggttagagtacttgctgttcttgcagaagaccagagtttggttcctagcacctatgtggcagttcataacttcctataactccagttctagggaatccaatgctctcttctggcttctgcaggttcttgcacacatgtggtgcagacaacttatgtaggcacatacacataagaacaatttttttaagtttaaaaaaaatgatggtgagagcctggagagatggctcagaggttaagagcattgactgctcttctggaggtcctgagttcaattcccagcaaccacatggtggctcacaaccatctataatgagatctggtacacagtgatacctaaacagcagaattcagagcttttctttctttctttttggtgcttctacagtaagtatccttatcttcatctgtttcttcatattcaagagtaagtttgaagcactgtttacacagaatctagggcattgcttccatcggcacaaagaggaaagctgtcaattactcagggctgctattccagtctcacagctacctgcataggagctgaaccatggttgggtctctcatgggtgcacagattttatactgacaggtacacattcatttgtttctataacataggcctgaatgtgtccagagagaaagtggtatttaaacaagccaaagtagaagagagtgacaaccaaagatacatcagaggttggaattaaggaccaagatcagtggcacagaggcatccagcaggaggaggcaccaggggagacagaaaggagtctgtgcctttgttccataattcacaggataacttctgaagcgctggaagatgcaaagcccagctggactacaacagcaggcactgacagccagcccatcctgaaggaccagaggaagctcaataggaagagttcacaaaggtgaaggtatcaatcgagtcctgaactactggaaatgtgccagggtggcaggtaagaaatccaggaaacacttggttagatcctgagtcccggactgggcagaggagcagaggaggtattcaacactagtagatttcttcttaataatttagaggggtgtgtgtgtgtgtgtgtgtgtgtgtgtgtgtgtgtgtgtgtgtgtgtgtgtgtgtgtgtgtgtgtgtgtgtgtgtgtgtgtattcgtgcacaaggcacatgtatggaagtcagaggacaacttccaatagttggttgttcccttccaccaagtagaacccagggatcaactcaggttgtcagagttggtggcttatacattgggccggaagagtagcagatgccaagcctgagtaactgagggatccgtggttctagctaagggggaaaggaaactgtaggaacagggtcagcacagagaacatgacaaactgaggtataagacaaaccaagtatgttttgccaaaaggaccaataaatgcattcagattactgaaaccacagactaattagaaaacaagatgggaaagacagagctctaagagtcactaagttggggtgggaaggagtccatggcaggcatctttccatatcagagattcaaatacagtatagcctgataatcctaggtcccaaaagctttctcaactttcagccaagtcttaaggaacactcaagatggctctgtagggaccctattaattacaaaaaggttgatgccacaggtaccaaatccaaaggacatctgatcttggcaagacaggcgaggcttttccacaggtactagccctcaggagctctacagcttaccatggaagggggtgtgtctctggtaaaacacaggcaggagcctcacagtgcacccttcccttcacatcctgacctagcaagcactgccacttaaaataacacgataaaatttaactttctttttgaggtcaggcagctctgtggacccaatgccatccctactgctggataaacaggaggtcaaagatcagtgactggcacagggacggtggttaatggtgtgggggtgggggggtctgacaactcccccccatcaaacaactactacagaacaagacttggaaagcagaaactctgcttaatgccaggaataaatcagtattcatttaacaggactctggcaagcttaacagtcaagagccctagactcttttccaaactggaggaatggctgtacttttttttaaccccacaacctctcatgccagtgaagactagaaaccatcacagcacaattgcagggaaacaagctgtatgaaggcatctgcttagcctttacaacctcagaatgacagacaactataaaaaccaaaaatatagacacagatactttcaaacaatcgaaagaatgattatttgcactgtgaaatgtataacaagattcactttcaatgagcttctcggcaggggacagtaacacacgcctataatctcagcactaaggaagcagatgcagaatgatcaaggctagcttgaattacatgagaccttggtctgagagatggagacctgagttcaaacccaggaacacaaatagaagtggaaggagaaaactgattccacaaacctgtcctcctacctacctacacctacacacacacacacacacacacacacacacacacacacacacacacgggcacacacaatttttttttttttaagggctagggatgtagaatacttgaagtagtaaccactgggtttgaccttctgtacaaccaaaaacaaaaacaattatttaaatcaaaaatcaaactggtatagaggctgtgatacaggtcagttggtagatgatctgcctggcattacaaggccctgggttccatccccacgtgtgagcatgagcacacaaaactggaactaaattatagtaggatccagacacactgacatccacctcaatcagagccacaaagtataccagagccacgggcaatgtgcacagctgactggaagagagaatgctctgggatgtgctgaacactgatgactggcgatgctggaacagacagttctgatgcttagtcatgcatgaccagaacttcctctaggagcctcacacactgacctaagtggagttctctggtggccaagcctaaacaggggttccactcaaggatgcctcagtggctactttcagggatggacttcaaaataagtaagagaaccaatgactgagaattgtcaaatctactttctcttttgttgttgttgttttattttattttgttttggtttgtttttcaagacagggtttctctatgttacagccctggctgtcctggaactcactctgtagaccaggctagcctcaaactcataaagatctgccttatgtctgcttccgagtgctgggattaagggcctgtgccatcatcccttggcctggagaggctttctgaccaggaatagaaccagggccaaaggggcgaaagtgctgaaccctaaccactagaccaccaggacgtgtcgtattttctctttaaaaaaaaaagttctccctcacaaattcaccacaagcactgaaacctcacttgcttttacattttacattttaaaagatgattctgcaactttttctttataactacataagaaaattaggcctctggcaggcagcagtggnnnnnnnnnnnnnnnnnnnnnnnnnnnnnnnnnnnnnnnnnnnnnnnnnnnnnnnnnnnnnnnnnnnnnnnnnnnnnnnnnnnnnnnnnnnnnnnnnnnngagggagggagggagggagggagggagggagaggaaagaaaattaggcctcaagtagtggcacatgcctttaatcccaacagtcaggagatagaggatctttcagttcaaggtcatcctggtctatacattgaaatccagagccggaagttgatggcacatgcctttagttccagcactcgggaggcagaagcaggcggatctctgtgagttcgaggccagcctggtctccagagtgagtgccaggataggctccaaagctacacagagaaagcctgtctcaagaaaataaaataaaataaaataagggttacagagatgactcagaggttaagaacactggctactcttccagagggcctgagttcaattcccagcaatcacaaagtgactcacaaccatctgtaaggagatctggtgccttcttctggcctgcagggatacatgcaggcagaacactatatacaaactaaattttttattaaggaataaagaaaactagataaaatttaggctttttttttaaaccaaaacatcaatataggaactcctagagactgtaaattaacgcattaatactatatccttaaaggcagtgttgtgcaacatgagaaaaaacttaaaatgacttctcactattaacccctctacatctaactagctatgttacttaaagaaatatacaaatacatgcaaagtatttttgaataaattagctttgtgagaaaaattatttccaagcagtcataaattgggaagtagctaagtctttaaaataaaataatattttaccaacacaaatactagcaagatggttcaatgagtaaaggtgtttactgccaactcaatgacctgagtataatctccaggatcctacaggcagaagaacttgttccttcaagtcctcctctgacccccacagttaccaatgcaactgttatagttcttaaaataagatttcagtagttaattctcaaaatctaccagaaagccatataagttattcaggagagtcttcaagtatattatagctaatgctatggaagaagataaccacagtccagacctggtggcacaagcctgaaaatatatgctgaagcaggaggaattcaacttcaaagccagcctagtcaacttaatgacactctctgacaaaagaaaaactaagagactggaggtggggctcagtggtagagcacttgcctaggatcccctttccctggtaccaaggagacgacgaagactgcccatactaacccctagtgttccttctacaattaaagtgtgtcatctgagcactgaaaaattcatcaaaaacatgaactcaaagcaggtcacagaaggccaaacattattctacatataacgtgatggtttaaacacatgccaaggtataataataataaaaataatttaaatcctataaaagtgtattttaaccagcaacaacagtggctgacatgttcttattgtataccctatgtacacactgaatccagtcaaatgactggaagcatatacaatttcaccacctgtaattcagggtttgacaaactgacttatagaagaggcaagtggcagagccgaggcacaagatagattatctgcagttaaaacttgaattctcccttctagccaggtgtggcatacacctgtaataccatccctgggaagacagagacagatggatttccaattcaaaccagccttcactacacaaaagcaagtctgagaccagcccagataccagtaggaacataagactatgtttcaaaataaatacatagataggtagatcaataaataacttgctgtctgtctatacttttttaaaaagatgtatttgttatctatacatcgttcctccagcatgtatccctgcaggccagaagagggcaccagatctcattatggatgcttatgagccaccatgtgggtgctaggaattgaactcaggacctctggaagagcagccaatgctcttaacctctgagccatctctccagccccctatctatactaactttatccatctagaatggaaggctttgaaacaactaaagctgtaattttcacaccatttcagcatctaagtaaagcagaaaacccagaaccttccatttaagttcataacaaaaatctcctgaaatgccaaaccaatcatttttagtattttggtgtaggtttcatccttctgcttcctaaactgtgctgagaaaacatggccaggcagcatggaactgtgctaatgcttaacttccaagggtcttagtttggcaaatgatttgagactctagatcccagaaaacatttcctttattagcaactggctttgagaataccattctaggatgctaaatataacgaaatcctcctgacctttataaacacattctccagattattttgatagtggtgattgtctattaacaagacagttttgcaaacacagtttagcaactgtaacattttgaggaatctttcaaaattgttctttaaagaattgacctgaaaactgttctttggattcttgtactatgaagtaacagagttcaaattccacaattcatttcccttaaaaggcacagaaacataaataaaaacaaacctttttttttttaattaagatttattttttcttttaaaccaggcagtggtggtgcatgcctttaatcccagcactcggaaggcagagacaggaggatctctgtgagtttgaggtcagcctggtctacaaagtgagttccaggacatcctgttacacagagaaacgatgtctcaaaacacacacacacacacacacacacacacacactactacatatattcataaaaaataatgcatctcgctgtttcctaaatgtatttcccatgcataactgctatattttagggagcatactcctagcagacctcacagctacaagcctctttcattgcacatgtggtttaaatgcacttgtaattaataagactggacagctcctcagatctgctctatataaaatatggatgtgaatggaagaatcaactgacactttatgtttggggaatggagccaaaaagctgggtgtggagtgtgaaaagtgcttcactactaacattacagttgttttgtcttatctagttaagtatagctaactttcagtgtgtgactctatgtgtgtgtgtgtgtgtgtgtgtgtgtgtgtgtgtgtgtgtgtagctgtagtccaccaactatcaggctttaaaaaaaatagaaaaagaaaagaaaaaacaaggtttctctatgtagccccggctgtcctggaacttgctcagatcaacctgcccctgcctttcctggaacactgggaccaactcacgcaccaccacactcacccctctaggcattctttcttctcccacctccttggtccagaacccccactaactttaagtatgcagtcacccttaactaggcagggtcacccacagtgtagccttcaaactcaccaacaagtatccagggtgaatacagcattctgcagggccatacccacggggaagattagagatttgtactgtctttgcaagatactcctaaatctggacctcagccctaacctttctccaaagggatagagttctcttctgatgacccactgtctacaggagaaacaaagttatttaagccctctatctttcatctaaaacattcttcctagtaaaattactgttggcatgctgtcaccaaagcttatgcttatttccttcctgatgttcccgctaaccaatttaaacacagtcaaaaggtacaagctggctgtgcggctcatgcctttaactctagcacagggtaggcagagatggatgacgtccaaaccagctagcagggcttcatagtgagattctgtctaaaaccaaacaaaagtttagaggataaaagtgggggtaaagtgggtgatggtggcccacacctttcatctctgcattcgggaggcataggcagacagatctctgggttcgaggccagcctgatctacggagcgagttccagggcaccaggggtacacacagaaacactgtctcgaacaaacaaaaggatagtaaactctgtcaactattaatcagagaaaggaggcagatgctccaataccgaagacaagctagaaaccatcagaagaacccttatttccgtatcagcttgtgggcctaaaaaagcatcagcaggtcatcagctggcaatccctgagttaaccagtccccaccactctggtccaggatccctcagtctgttcgcacatcactgaacctgacaactgctaagtcgagaagcgcaaatgctgtcatgcaacgtccacagtaacacaaccactctccacctttctcaacttctccacacaaaccttgcactttcaatcaaaggagcgcccccacattggttgtgtccctgccaaaatggcctcctccttaccttcctcctttaccccatcaaagctcacacttggcgcagtaaacaaacccaccattgggagcacacacctgctcattaaccggaccgcacgtggcgtgaatcaagacgcctccctgataaaaacccaacatattgaatgttttaatcaagttcaaaagatgattttaatctcccaggggacaaatgctatggcctgagtcctccccgctccccatttaacagcagcatttttaaagcgagaggtgaggctacatcgcactcacccgctctgtggggtgtccagtctccacaccaggaaggcctagggaaggcgtggaccccccagagctcacgcgctactccccgcgcccgagtagcgcccgcaggcggctgtccccacgagcggagaacgctcgccgaccccctgcgcagctccggcctggtgccgagggccccgaaaaaaggtcagagggcgaggctgccggcgcgccccccgcacttaacgacgccactaccttgtcctccggcggtgcgtcctcgcggaaagacctctgccgtagctcggtcatgctgaggaccccggcacgatgtcacccagggcgagcagcacggtggccgtggagatgggctcagcgcgcacggcctctccgcgggcccgagcgcctcgcagccccgcagtgctccgcacagcccctgcagccgcgccgctagccccgagcccgtgcccgcccagcaccgctgccgccgccctggcccgaagagccgatgcgctgcctccctagcggccgctcgctcctcctcccgggcagctgtgagccagcgcgcacgcgcaccgccgccatctcggcccagaagcctagacgccagggggcagggcagcgggacgggggtggggaggataggcggagttagacgcggtcattggacaacaacgggaggaggcgggagaagggagcacaacgaaccaatgggcgcttgcgtcctaccgcgtgtgcccgcgcaggagataacccgttactgggggaccacagcgcctcccggctgtaaatattggccagtaattgacgttctcagcttagagatcaagtggagagaccaggcggacctctgaacagcgggcatcatagcagaggtgaaacccgaacttcaagcacacgttgtcttgccaagctgtggttgttagtaaattaggagcactgattctgtctaggcacggagctcagaaatcgctttggttggtttgtctcgttcaaatcacaggcctttttaattcccatgacaagtgagaagacagagacaggtggatctgatcgatgtagcctgttccagagctacccaatgagaccttgcacacacacacgccaaaaaaatggaaatggatataatttttgcaagtaagatcatccaaagtattataaatttcttgtcttagtgtttgttgctgaagatagaattcaggagtatgctattctcgcacttgattttttggaagctcttttagctgacaggagcgttttctgtggctcccctagatccctaatatagcctatgcggttgataaatggattttaaacttttaaagggaaagtatttagctagcaactacaaattaactagtaagaattagaacccagatgttggttaccagaatcatgctgtagccaatgttcacattggcagcctgaacccagtaacaccggtattactccagcattgccctggtgcaaaccaggggctccctgtcttaagctatatgttaatgtaacagtaagaggtcttcgccacagggaaggttcagtttcttagcgattttgttctgagctgtgagttttcagaaaatatctgaaaagggcattaaatagtactggtctctgtgagtatattctgaagttcttgttaagataattcaaagtgacagtaaaatatttagacaaacttcagaacctctgaactctgaattttgtttcctgtttaacagctttgcacaaatacttgggtgctctggttgcttggctggtggctgttgtttttgttgggtttgggttttgttttgctttgctagaagcaagtatcactgccttccaacaacaaaagctcctctgccttgtctctaaaaataaaggtgcctatgataattttaaaattcttgtaaatgctttgaagtctgtgggaacaccagtttgaccaacaccatttatcaaagtatctaaaaaacttagaagagcaccagctcatagtgtccatatctttaggacaagtaaaggtatagctatccagatccacaccttttgggtaccaatcatgtagttgaagagtgttgcactggtttgtacaagcctacctcttccatttcaagcccagtctaatataagaaggctagagggctagggatgtagctcagttagttggtagagtgcttgcctagcatccataaagcctgggtttaatccccagcaccaaacaaactgggtatggtgtgaggacacacatctgtaataccagtatgagaaagggagagacaggataaccaaaagtttgaagtcagcttcatctatagagtgagttcaagtccagcctagaatacatgagaccctgtcagaaaccaaaacacaggactagagagatggctcggtggttaggagctctggctgctcttgcagaagcttggttctcagcactcgaatcgtggctcacaattgcctatcattctggttctagctccctcttctggactacagaggattagagagatggctcagtggttaggagaactggctgctcctctagaggaaccaggttcaattctcagcacccacatggccagcttacaatgtctttgactccagtcctaggggatacaatatcctcttctggcctcctagggcaccagttgcacacatagtacacagacatacatggagacaaaacacccatacacaccaaataaaacaaaccaagacctggaaaccaattaacagaagtcagagttatggagtgatgaaacatgtattcaactagacattgccttaaaatctgacctgaacaaagttctcaattatcatcatcaaacctatctgggttaattaaactcacaccaaatagtgaattaaaaaagttaattgaacccacacctaaaatcagtgttgtggggagcaagaatacatttgtcagacatttctagaagtcatgttaatagtactttgtgtcaattttaatgcctctccaattgcagaaaaaaatcaaaagtaaaaagtcttcctcagccaggcaatggtgatgcacaccttcaatcccagcacttgggagtcagaggcaggcagatctctgtgaatccaaggccagcctggctacacactaagttccaagacagcccaggatacatagaaaaacaaaaaaacaaaacaaaacaaaacaaaaaaaaacagtcttcctttacctccagccaaatcatttagttcctttacattctcttgtgccccctcagttccagggttttgtttttgttttttgtttttgtttttttttctgctcattatatttagtctttcctctgtgtcttagttggggtttctattgctgtaaagagaccccatgaccacaagaactcttataaatgaaatcatttcattggggctggcttacagtttcagatgtttagtccattatcacaatggtgggacatggcataaatgatgctggaggaggagctgagaggtctacatcgtgatccacaggcaacaggaagtgaactgtctctacactgagcatagtttgagcataggaaacctcagagcccaccccctacagtgacacacttcctccaacaagaccatacctactccaacaaggacatacctcctaatagtgccactccatatcagcttatgcaggccaatttcattgaaactactacactcggaaataatttcttccagaactcagacattttgtaaatcctttttttaaagtttttatttatttattacttatacactgttctgcctgcatttttgcttgcataccagaagagggcaccagatctcatcgcagatggttgtgagccaccatgtggttgctgagaattgaacttgggactctggaagagcagtcagtactcttaacctttgagccatctctccagccccataatttttttatatagatttaccttgtttcatgtgtatgtgcctgataactgcagaggtcaaaaccagaaaaagacattaggtcccctggaactggcggtacagatggttatgagccatcatatgggtgctgggaaatcaaacctgggccctctacaagagcagcaagtgctctttttttcccctttctttctttctttctttctttctttctttctttctttctttctctctttctttctgtctttttttagtaaagccccctttctcttattgaaggaaaagtccagaactgcaaacaagctctcaggggcaaagctgtgctaccttgctggaggacctgtgtcataccccagtaccaaaaaaataagatgaaaacttctttacactaattaaattcagtagaatttatttaacacaatgtcactctagaattgactggcttccagaacccaaccaagcaggttctaagaatttgggctcacaatgcaatcaaacagcattttcagaaaatcatagttgtgaattagaaaacaatttagttggatacaacttagtcaatcaactagcaattagctgtagcagcaattcagtgtagctgaactagcaaattgttcatagctttattagttcattggatactggacatttgataaccaaccaaagctgcttcctccattacactttgtattggtttggtctcttagactcagttgagatgcctagtccaaatataaggctccaacagaatattcttaagccaggtgtaatggttcatgcctctaatcctagcactccggaggctgaaactggagaattagtgcaagtaagttccaagccagcctaggctacagagttaagaacctgactcaaataacaaaaactagcaggaaaaaaaaaagtttgagttatagtatgaaccactaaaaccgaaagtgtactcaccaatagagtatttttaggaatattacttttggtctttggttggttgtttttgttgttttgttttttgagacagattttctctgtctgcctctgccttccaggtactaggattaaaggcgtgaaccactatcaacctgcaagaatattagttttttctttttgttgttgttggttttgttgttttgttttgtttttcccgagacggggtttctccatgtaacagccccagttgtcctggaactagcctgtagaccaggtttgtagagagccacagccctaagatggcacctggctggatgccaggtagtccgagctcatctgtaaacaagccttatttataagtgcttgaggcatctggcgcacttcctccttctgtggcctatccgggattgccagatggcatgagctgattgggcactgagcatctactaaagggcttgcggggctgggagaagggagaagctgatgtacaaggtttctgaataaactgcttgaagaagagtcgtggtcgtgtttctcttgctggtcgagatagacgcgacacaggttggccttgaactcacagatacccacctacctctgccttccagttgctgagattaaaggtgtgcgtcaccaccaccacagcctgagcatagttttttttttaattgtttatcatttattcaatgaaaaagagggaaattaagccactttcattttctcctaaactctcaaaactcccttccttcatttagaaacaaaacaagaaaacaacaacaacaaaaaaacacaacaaactccccccacacacacatttgtacaaaagccacacaacctgctcctaacaaaactggatggaacccaactgacagacataaaaagagctgtgttgaactcaggttctataggttacaagcgctgcaaaattacctccacttgcatctttcaaactggaaaatgatcacattacagacctgaggttataaaggaacacagtgtacacgagtgtcctgttctccttctaggactccaggggaaaggcgagcatgggagtgagcttccttaggaaaagagagaaaggagggaaatagtggaaaccctggccactgtctaaggcactggggtattcctggggccaaatgagttatgtaacctcccaaggaacaagcttacttgcatttctactccacaagtctagagcacacacaagaaaagagtaagctttccttagctccagtacaccaggactcagtgaccaaggccacacggtagaggcaaacctgagggtctcaagagcaaatctcaattttttaaaaagtttatttacttattatgtatgtatatagtatcatgcctgcatgtgtccctgcaggacagaagagggcaccagattccataacggatggttgtgagccaccatgtggttgctgggaattgaactcaggacctctggaagagcagccagtgctcttaacctctgagccatctctccaacctatagtgaagggaccagctctccattttggcagccataacagcctagtatgtgcttgcttgaccttgccttggtcgctaggaggtcagatgcctgccttgtggcaaggaaccaatcagaagttagctggtagtgctatgctttacgtctctgggtgtgctttacagacaagtgcacagtaatgacatgcagcgcatagcaaccaccctgggagggcctatgggccataacaaccagttgaccaatcaacacagggcaaaccctccaagcctggaggcacaccaatcctgagcctgtgcgtacccctagacattccccttacactgccctataagatctctatcctgtagcttctcggtgtctttcctagccatctgccatggtggatcgatgaaaggcccaagctaacatggggttagcttgttaaacaactacaataaaacctcttgctgtttgcatcaagtttttgcctccgcctgatgattggggggcttcagtcctgggctgagatcctgggggcctgagtctctgggggtctttcaatagatttatatattctgacattaagggttctaagatgttgtagacacctcccccaacaccctctcatatgtaaagctttaaaatacacatagaaaaagatatccataagacattctaccttgcattctcaataacgaaactgccagccgggcagtggtggcacaggcctttaatcccagcacttgggaggcagagataggcggagctctgtgagttcgaggccagcctggtctccagagcgagtgccaggataggctccaaaactacacagagaaactctgtctcggaaaaaaaaaaaaaaaaaatgaaactgccactaaagtgaagctctcacagaaacaccctcttgctaccaagagcatagctatttgtaagtacatattttcaactaattcatgggcactgcaggtaccataccaatggagttcatgagccatttaaaatttcttcaggggacttaggtgtagctcagtggcagggtttgtgcttagccttcatgaggtcctgacatcagttcccagcattttttttttaagtctttaaaatgattactctgtgactaggcattaaagaaaatattacataagcccctagcactgagacagggcaatagaaaatgcacatttattgtaagcaaagcagtatcctgggtgggaaagaacacattctacggtttgcaaaggaaaggagattttaagaaaatctggtcggtggtggtgcacgactttattcctagcacacggtaggcagaggcagatagatctctgtgaattcaaggctagcctggactacagagtgagttccaggacagtcaaggctgttatgaagagaaaccttgtctcaaaaaaacaaaaagagaaaaacccaagaaaagaaaatcttcacaaatatatgtagctatattataggttttcatttttgtttgtgatgctgaagatctaacccaaagtcctaaacacacacacacacagagagagagagagagagagagagagagagagagagagagagagagaatcactaacctataagccccaccctatgttatgttttgatatgtgaaggaataattcaggctgccaagactgcttagcaggtctggcaatccgagttctaacgtggaatccacatggtggaggaacagagctgcctcttgcaagttttcctctgacctccatacacgagacgtgacttacatgcaccacatataaatagatgttaataaaacaattcattatacataaagcaaaaaagtgacagtagcaaaacttaaaaatgagccaggcagtggtaatgcacccctttaactccagcatttaagaggcagaggcagaggcagagacagacggatctcagtaagttcgaggccagactgatctacagttccaggacagtcaggactgttacacagagaaaccctgtctcaacccccccccccaaacaaacaaacaaaaaccccacaaaaccccaaacaaacaatcaaaccttacaaataaatgacagggacttacttggaagaaagtccagagacaacagagcagcattctcttaaaattatttttattttatggagttgcctgcaagtataccacaagcatgcctggtgttttgaagagggtgtgaggttccctagaagtgtagttacagaggtttataaactgccatgttggtgctgggaactgaactctaattcttcgaaagagcagccggtgctcttaaccactgagccatccctccagccttagactggtatctgagttgtttcatcaatgccctttaacaaagcagagtataatacattaaaaagagagtagcagcaactaagtgagaaactctggatgtaagaatgtaagcaaacagtgcaaacaccttcattctctcttgtgacactgtgaatcatgctggggcctgcacaggtcaggccagcactctcctgtaaaggccagcactacaacctttcatgggttctggctagggaacctgaggattaactaagaaaagacacaataggtcatttttgcaaggagaatgccagtttatttcagaggggaggagacttatatgccaacagcagccacagtggaaatttactcaaatcaaagtccatgctctcaagccccctggcagagggcagaaaatttacactctggcatacaaacctaggcagaaggaggaaatggacagcgagccccaggggccccttaggtcacccagccgggtcccaatgttaggaaggcagtggtggcatacacctttagtcccagcactctggaggcagaggcaggtgaatctctgtgagtttgagaccagcctggtctataagagctagttccaggacagcctccaaagccacagagaaacactgtctcgaaaaaagcaaaacaaaacaaacaaacaaacaaacaaacaaaaagaggcatttgaaatagaaactgtggactttcacattaatattttacactttcggcatcaaacatattttatccatcaccaaaacaaaacaaagagaagaaacattagaaattaaaaaaaaaatagctttacatccgtttgtagctggtgtccaccacctgcattcagtttcccccacccttataatcaacaggaaaaagaaatttcagtagaacaaaacgcagcaggaacacatgcacctgtaatggctgacattttcaggaatgggtattgattttaacatgaagttattggtgcttagcgtctaggccctgggttcatctccagcctagatggggttcaggctagggaaagaggcgtaacagggaactaattaggtgggacctatggattatgtatcttaagagatagtcatactttggggttctttgcagaagtgttcacggcaagaaggaactctttaatctttagggaggaaagttcagagcgcccaacacagtgaagtgatagaaaaccggggttaagatgtggtggctccttccttactcggtattttgcagcgttttcgcctacgcagtagcaaaagcgctctgtagtgtttgaaacaggtatacttttcgacttcaggcagccctgcaccccacccctcccaacccccgacccgcgcctcccggcgcagctcggcttgcacgtgactttcatttccgtggcgcggaaacttgccgggacaagcctcctccaaaaggtgggcctccgcggatcccataatgccccacgcttcccacgcccgtacgccgcagccccgcctctgtgtacgcggcagggcgggccttgcgcgggactcggatacgattggtcctgaggggaaggtgggtggggcagcgcggtgacgtcgcaactctcgcgcacggaaagagcgcgcgcctaggaagcggcagcataaaaacggttgcgggcgcccaagttggtagtcgctccctgcgggtcctcgctgccacttctgcatcgcgagccgggagaccttcgcggccggccctctctcctgtcacagtctctagtatctagtcgtcgcgactccgccaggatgttcgaggctcgcctggttcagggctccatcctgaagaaggtgttggaggctctcaaagacctcatcaacgaggcctgctgggacatcagctcgggcggcgtgaacctgcagagcatggactcgtcgcacgtctccttggtgcagctcactctgcgctccgaaggcttcgacacataccgctgcgaccgcaacctagccatgggcgtgaacctcaccaggtgagcgggtggcgggagctgggctctagccctcccgcctcgggtcttggcggggctccggctccgtgctctcattggctgacgtggtcatccgcgccttctgattggtgtctggagctgggggcggagcccgaggaagcgcgcggttctgaaaagcccgcgctggtggccgcgcgaacccgctgtttccgcgccaaagccacaaaacgggtgccggcgggaaaatgcctgcgttggagatcagttcattaaacgccagcagctttttttatttcagggcacaaccttgtcctggctaattttagctgcctactaaacgtgttctggtgaaaatgtggtactgtccacttagagggacaataggccttttctacttggagtctagaatctcattgcgaatcatttgtgggaaaatttaccagtcttagcttttaactttgttacagatgcatgaatttgccaccggtatacgttttaaaagatttgtgaaaaggccacatatgatatagggcacactctgatacactggaaaccaaggacatcctgcccaaaaaattatttactggcatattgcctttgagtggttttaaggatcacattcccgatagtttactcccccccccccaggggatttggtgtgggcgtaaaagggtaacatcttgtaattgcctttaaaagagtagatgttgaacacatggtgttgataagccctgcttcttgttttctagcatgtccaaaatactaaaatgtgctggtaatgaagacatcattacactaagggctgaagataatgccgatactttagcactcgtatttgaagcaccaagtaagttacacctctaaaactcaattgttacagaaagcaaagtatgatctgtttctcaaaactaaggatattaacagaattgcggttgtaaagttttacaccataggtatgaacatgtgcttcaataacatttgcttccttttgttagatcaagagaaagtttcagactatgaaatgaagttaatggacttggatgttgagcaacttggaatccctgtgagtattttgttctcgtttctggtggtctttgaactcattctgtagactcaaactcagcagagatctgcctgcctctgcccccttagtgctgggagaatatcctgttttcgctggtgaattttaccaagctgtgataccagctgatgagttccaaagtgggtatttggaatgaaagacaatttcactaagcaatgacagtctaaaattgagttttaaagaaatcagatacttgtcctcacacttctgacctttaactttgggatttacaggaacaggagtacagctgtgtggtaaagatgccttctggtgaatttgcgcgcatatgccgagaccttagccatattggagatgctgttgtaatatcctgtgcaaaggatggggtgaagttttctgcaagtggagagcttggaaatggaaacattaagttgtcacaaacaagtaatgttgataaagaggaggaagctgtaagtagtaaaagttgtctgcagtgtctgaaaggggaatgaatataagcttaactgctgagctggttctccagacctagctcttttgaggtggagtgtgagtagaccaggctgtctttgaacttagatactccacactctgcatatatgctttcacaggtgggactgggaagctaggtgtttccaagcttttgcttcctagaatgactgacaaataagcattaacaagtgaacagaagaaaatggttggggttgtgagtctgttgggatcatgtagatcttgtagtaagtagctttgtgttggactttcacgtgctaccccatttaatggtgcaaaagcagactaagtaaagttgagtgttgataagttttaaagtcctcaaaaatgaggaagatgttggaaaggcaaaagaaaaatgcctggaaagcctcattcaagcagaagatactaggctaattgctaaatattcagaagtcaaaactttttaattatactaagttttttaaaaagttttgccagctagtctgagcatcagactataaattgcagacacagtctgaactaaatatgatttttagtgctaaatgtaaaattcggagtgcttaacacaaagtgtttaatgttattttgtctgcaacttgtataactgaggattagaacatatatacacaacccatagggctggttcttaaccttaatctgtctgcttaattattcctacttacctgtcatcctcagatcacaaggtatttaattcataagtattttgtttaaagcataagcattaccacaacaaaggaaattaagttttcagtattcacatgtttcttatttccttagtttgaattgggacttgaaaaaaattcctgataaaatgaaaattggtcaacatgtcccttagcttgcatttaacttgttgcttcttgttactagagttggttatgagctgctggatgtgggtgctgggaaccaaacttggatgttgtggaagagcatcgagtattaactgttgggtcatctcgccagccgtggttacttttgggggtgggagttgagtgttgtacattgaacccaggacttatattagtcaagtgctctactggttagctatcattccatttctttttcctctatatagattctttggaagagattagtgcttgcagtctagaaaagaacagccactttctttgtgttggttgcttggggtatgcttctacaagagataggctaaatgtgttttagtcttcaaacttttcataaaatcctccaaagtgataactaaaggtttttgttttgtgctgtatgttatgtactaatgtgtgagtttcttgatgttgtgttaagtgagcctgttttcttctctaggtaaccatagaaatgaatgagccagttcagctaacttttgcactaaggtacctgaactttttcacaaaagctactccactgtctcctacagtaacactcagtatgtctacagatgtaccccttggtaagatactaagttttaacattgttttgtagtatagtaattactcctcagtcattaacttttcgattaaattttcccatcttttagttgtagagtataaaatttctgacatgggacacttaaagtattatttggctcccaagattgaagatgaagaaggatcttaggcgttgctagaatctgagaaaaccaagcctttgagaactgcttctgagatgccagcatgttttgaagtcttttctgtcaccgagtttgtacctgagtacatatgtagatatcttctgtaaataacctacttttttctctctattctccacaatttgtttaaagaataagctccaaagcaaaaactggttcttttaacataaatatatctgccttagaaatcctggcgattttttatgaaagatgttgacgctaaatgcagtttcaagaaatgtttttcagtttaaataaagttaactgaatccaaatgtcgaacagtgtctttgaaccacaactactgaactctcaaagttaccgttttatgtaaatgggttttgttttccattttaaagcagcctggagttaatacgtcacggaggtaatttttaaaaaatgtttcactttaatctgtatgattaggttatagaaaaattttttctggtatgagtagcttttaaaggaggcaggtggatctcttcctaggccagccaggactacatagacctcaaatacataaaggtctagtttaaattttgtagatgcttgatccaagcaggtttaaaaaagccttgtgggcttgaaaagtcatgacatgctacatacttaaatacttgttttttatttactatttcatgtgtggagacaacttataagaattggtacacccaccacgatgtggctttcagggaattaaatgtgcttcaggtttggagacaagcaccttcactcagtaaacattgcttgtccaaattactccaccttttcaggtgtttagttttgactgtcccatcaaattttgtttggcagtttataaagggtacagttttggtagttctaggaggttgttggttagagctcatacccagtagctattactatttaaagctttgtgtcaacacgtagagaaggaaatgagctacaaatacgcctcacttgtagaactctggggtgatggacatgctttatgaagactggtcactgttccatcgggaatatattagaactctagtgtgtctggtcagtagtactctatagcttgagtggggtctgataaccagatagggaaactaggacaaaaatttggggctgagaacgctagtgggtacagaccaatgtcatcatagccctgaatagggcagggaaagattcccttgcccacctctccgggtcccggggactctgctgtgcacagacctggccatgatgggtctgggctggaaccacattaacaggcttgccttggattacatcgtgatgggagggacccttaggtttccaccctgggtggcagacccaggtcaccagcacaagaccaaactgctggcccactaggtattcccagcactcgggaggcagaagcaggggaaacatgaactgaggccagcctagtcaacatattgagttcagcaccgccagccacaccgggaactgtcttaaaaactgtccacccttgcggtgacgttgcttcctggtggtgccatttccggtgcgcctcttcgcacaccacttccggtgggctggcgctctggccgccgttggctgttgggagagcggcgctagcgcgcgtaacggggagcgggagacgctccgcgggtcggggctgggagcgcgctcccggaagccagccgcgaggcctcgccccaccaccgaggctgcttcccggagccagttttgttagtgctaagttcgcgtgggtcctgaccggggtggcgacggtggaggccggcgggaggctgcccacagcgccacgcgcaggtgcttgggggcagaaggggggtggccaaggttgcgggggaccggtaaaaagcatagtagaaactt

SEQ ID NO: 9 - DNA, 39935 bp, Cricetulus griseus
  >scaffold_5 dna:scaffold scaffold:CHOK1GS_HDv1:scaffold_5:76073260:76113194:1
caaatcccctgggacacaatggatggagagaaccgactcccttaggttaacctctgacttcccaaggcaggcgtgcatccacactagcacccacacgacacacatttaataaatgcaataaaaaaaatagtcgggcggtagtggcagagagaaaggctgatctctttgagtttgaggccagcctggtctacataatgagatagttagggctacaaagcaaaaccctgtgacgaaaaaccaaaatttaaaaaaaaagccaaaaaaaatactaaaaattgaaaaagaaaaacaaacaaaaatcctttgttgctccgtgcaatgggcaaggtgaatgcccgcgacgaggccggctatgtcgcaatcctaattcccgcccagaggaaggtgccgccccttcgagggagggcagcggacgtgacgcagagctcagcaggtcctgcagcccggctcaagtgcgggctcgggccccatgtgccttcagtccccgccggcccaggtcgccggcttctgcagacttcagggcacagcagcggcagggccgcgcctgcgccctgagcggagtcatgtccggtaacggcagcgcggctgcaaccgcggtgagtcctgagccggtgacccgcactccttggggttttttggatgcaacgattggtcccgggctgccatgctccgtcgtctattggtcagaatagttagctgtcatttttcatccctccctctagacattttaaagggccagtaactaggttgcccttaggaagggaagggggtgatcctgagctgtgggggcgaggctgggagtggaaagatggattttctgtagctcagggttagtgggccagtaaaggtgtgtacacaaagaagatcctttcacaaagtaagggcagaagcaaatccagctgccttggaatatgctacaatttattcgtgggagagcacacccccaagccttagaactatatacagaactatatacaaacatcttggaggtgtttcttctccctttctccgttatgaaagtcacccgttcccagccacccacaacattcccagctgagacacacctgagttactattgtgaatggggaaccacttaggccttgtcattccttgcctactggaaaactctggacttgttggcaggcattgcgctgagctctgaggctgctggctgtctgagataaggcagagctgagaggcctgcttatctcttgcccaggcttgagcagcaggaggctttgatggtgaagacatttcagagctctgggtcaggaggaggaaggtctggattccagcacccactttctgcctgcctgttcatagctgtgagacttttaaccagtcatttgtcctctctgcatcgttgcttctgagacacttggtggaagtacctgccctgtctaaccttgtaggttgctgtgaggacaatatgcaaagatgatggctcaagcctataagtgataatattccattcaccaggctggtctcagactcctgggctgggctgattctctcagttatcagcttattgagtgttgagactacagacatgtgccaccatgccccggatgttttattttccacgttgtttaatagctgttatcattagcatgtttgtgcttgtgcctgtggacatatgccgcagagcacatgtggaacagaggataacttttggacatgggttctccttccacagactctgaggatagaacttaatgtcatcaggtttgcacagcaaacacgtctgctggctgagccatcttgtcagcccaaatacatttttgtttgtttgtttgttttggagtcagtgtttctctgtgtaagagccctggctgtcctggaacttgattagtagaccaggctgacctcaaactcacagagatatttatatatctacatctgcctcccaaatgctgggattaaaggccacatgctcaactccaaatacttttttaaaaaattaattttattatgcctagcagtggtggcgtatgcacacctttaatcccagcagaggcaggcagatctgtgagtttgaggtcagcctggtctacagagtgagttccaggacagccagggttacacagaaaaaccttgtatggaaaaacaaaacaaaattaatttgtttattttatgtgtattggagttttgcttgaactcatgtctgtgtagaactatattgtgcccaacagaggccagaagaaggaaccagagttacagacagttgtgacctttgtgtgggtgctgggaattgaacctaggtcctccggagaaaagccagtgctttaatcagggaacagtctctccagcccctcactgcacaatactttttttttagtgtgggggggagttgtttcttttctttctttttttttttttttgaattagaaacaggattgttttacttgacaatcccagttcccttctccctcccgggagttgtttcaagacagggtttctctgtgtaatcctggctgttctggaactcatagaccaggctggcctcaaactcagagatctgcctgcctctgcctccagagtgccgagattaaaggtgtacactgccacccgatactttttttttttcaagacagggtttctctgtagctttggagcctatcctgccaatacttattttttaatggaacggttggacttgaaaatgttgtactgggtcaatcaatttaagggattgcttgaacctagtaattcctttctgtgggctccctgtggcctagaatttctgtgttgagtatttcaatcctagctaaattgcaaaggctgtctcatagttcattcattggagagtaatcacagtggaggagacaagcccaggaacaagttttcacctcctccagtgaccaagaacctgagtgtctggctgcagaagaagctgtgagacgaggggcccagtgcagggaaggtggacagtttctatagtggctccagtcagcagaaagaaatcagacctttgtgtcagtcagactgcagaacccagttctacctgctcggcactaaacacctttatcctaggcagcaccgtgacaggaggaagaggcgtgtcccttgagctctggctctgacattagagaaagcatttagacaaatgaacgttaggcagtttggcttgaggcattaggtggcctttcatttaacaggcccctgatggtatgatgtccccaaagtcacctagtcaagaggatgaacaggactatatattaggttggctgacctcagtccttgtaggggtacatcctagtcagggtaaggaacccttggtatctcacctaggggttagtgggactttctcaagtgcctgagttgttgtggacagtaaacctgtcctctagtgatgtgcggcttcagctgtcatgccccagcctcttgcaggccccaccctccagcagggcccaccctcactgtgctcaggctgatgggccttatcattttacccacctggctgtgtgcagccctcccactgagaactgccttggccaggctgggctttgaggctcagtgtcttagttgctgctgctaccacaacgaatcctattacagctttcctctgctctctgcttctctggatcctggaggagggcagaaggtactaaggaaggttaaaagaacagttgtggaagtctttccctatttgaagactcacctggccagggcctgggggtcctttctcctaagcctgggatcctagttcttggataaggtgttgtggaacagacggtaacctaggaactttcttctacaggaagaaaacggctcaaagatgagggtgattcgtgtgggtacccgtaagagccaggtgagtacagatggagggagttgccagaagagctctaacaaatgctcacaaggtcaccagttgaggggacctgaaaataagaatgcctgggagtcactctcatagagaatggcagtttacttcctctgaaaagaaagtccctagatcagggaagtggttggggtacagagaaaggactcccaagccaggccattctagaatatacccatgtgagaagcctagtcccttttaaaatctgtcttaactcatatgaggatttgggcctggggcagtggccaggtaaaggcaggaacaatctgaatctctgtccccagctggctcgaatacagaccgacactgtggtggcgatgctgaaaaccttgcaccctggcatgcagtttgaaatcagtaagttttcttgagtggagtgaatgggaagccaatgaatgggagaacatggaacttgtggctttgaccacaggcaaagcctgtttgtgagaatctgttttggctgcttgcaaactgagggttaaccttctgtgaacatgttcacctccaactgccttgggctagcctggcatttaatgccttctgacttgggtctttttatgagcgtgtctgctttttctgttagtgtgtgtattcctcgagggtaggagctagggcctatgtgcttctgatctcactgtgaatcttagtacagtgctgaaccactggggactcagtagatgctgattaatagagtatctgattgactctctcctcagttgctatgtctaccacaggggacaagattcttgatactgcactctctaaggtaatgacagcccctatctgtgctctcccagcccctctccccacttgttcccataagagggccactctgaggctctttcttatctggcagattggagagaaaagcctgtttaccaaggagctagaatacgccctggagaaaaatgagtaagtgaaaatcggaagcatggtactcctccagtctcttgctagaaccccaaagttattagcaggactgttgggttaggctaaggagctcataggctttcacaaagcagagtgtcttgttttggaaccatctaactccttagagtataagattggctgggaaattgggtagagtagttgagaggaaagcaggcttcagggtccttaggtcttaggactgtctcttcctgaacagctgtagtagaagctcaggtaggtggagaagtgtaaggtcagctactcaaaacctctctccatgtcctcctctctcatttctagagtggacctggttgttcactccctgaaggatgtgcctactatactacctcctggctttaccattggagccatctgcaagtaagagttaagaatgtgaggggtgttgggcagggaattaatcccaccatatgagtctgacatttttcccctttgggacttggccacttagccctctgctgggaaagttgtcagtcattaagcatggcagaaaacactggaaaagcagattggttggctagttagtgtgcatgtagttgggctcagtggcacaggcctataatcccatctactagggagggctaagacagaggttcacagcctgcctgggctacaaagtgattttaaccagcctgagaactaggtgagattgtgtcccaaggtgtggggtacaaaaaggctagcttatgatggcttagccagtaaaggcatttgcttccaagcctgatgacctgagttcaatacctgggatccatccacacggtggaaggggagaattgaatcccgaaagttgtcatctgacacacacacataccatggcatgcatactctcccaccccataaataaaatctaaacaatcaagaaagcaaaacactgctgggcagtggtggtgcacacctttaatcccagcactccagaggcagaggcaggtggatctctgtgagtttgatgccagtctgggctcctgagtaagttccaggaaagctagggctgttacacagagaaaccctgtcttgaaaaaaaaaaaaaaaatcaaatgtcaggcctgctgactcatacctataatctcagcatgcagggggctgagaagagattattgtgaatttgaggctagtctggggtacatgtaaattttagggctagagttgaactctgtctccaaataattattttatttcattatttgttctccagacgggaaaacccttgtgatgctgttgtttttcacccaaaatttattggaaagaccctagaaaccttgccagagaaaaggtgagtggacttggtatacagaagacagagggatggacagtggagaacagggcagcccctgttaaatttaattttaaactctctctgtgcagtgcagtgggaaccagctccctgaggagagtggcccagttacagaggaagttcccacatctggaattcaagagtattgtatcctttcacaagagggaagggcagtggccaaagaggaagagaaggtctagaggactcttgagagccctgagtatagaagaaccctccaaaggaagtggcccatggtggcagtgagttatccatccatccatccatccatccatccatccatccatccatccatctttagtgttttcttcaactctggcaggtgcctggcaaggaggataattgtaaaataaacattgtttctccatatatagagtctgcatgttagttagcgagacagatagacattgacaatacaagtggtactgatcagtaattacttctgagtgtctgggatggaaggtgctcccatttttaccctatttgctactatatggttttgattttttttaagatttatttatttattatgtgcacagtgttctgcctacatgtatgtctgcaggccagaagagggcaccagatttcactacagatgattgtaagccaccatgtggttgctgggaattgaactcaggaccttttggaagagcaggcaatgctcttaaccactgagccatctctccagcccacggttttgatttttacagttgtatgtttcataaaactaatttttaaaaacagtatgttctgggactggagagatggctcagtgattaaaagcactggctgcttttccaggaccctggttcaactcccagccacccacttggtggctcacaactgtttctaaggtctaggggatctgatgctctcctctggcctccacagacacacatgcaagcaaaacacccatacatatgaaactagaataaataaatagagatagtatgttccagtcaggtatggtggtgcacgcccttaatcccagcactctggaggcagaggcaggcagattctgtaagttcaaggtcagcctggtctatatagtgagtcccagtatagccaggctacactgtgagatcctgtccaaatgtcttaaaaagtcagctagaaagagggggaaagagactgtgggaagaggatgtactatggtcattattctccttagcatctcaacagcggggaaacctcaacacacggctacggaagctagatgagctgcaggagttcagtgccattatcctggctgtggctggcctacagcgcatgggctggcagaaccgggtggggcaggtaggggcttctccattccatttccattttaatatgcctctctctcctgctatctttatgaccattctgccaataacgctacaagccaagaagtaagcccaggctggggagagttcatccccctggcttcccaattggcaaaccttagctcactgctttgggacagcccaccattctttctgttctgtcttgcctccacagatcttgcacccagaggaatgtatgtatgctgtgggtcaggtaagtttgcctggagagggctttcttcatgtgccccttcaagaacctgggttcagtgccattgtgctttggcatgtacttctgatcaaataaaatattcagggaggggcaggctttggcaagcagaagactctgggaagcaagtaggagtggttcccatgttcagccatgactggagaaagattaggcctgtttttcctttagggagccctagcagtggaagtccgagccaaggaccaggatatcttggatctagtgagtgtgttgcatgatcctgagactgtgcttcgctgcattgctgaacgggcctttctgaggcacctggtaagacttgggctcctcctatggtggtgtgaggaggacctggaatcaggaagggcagcagggagatgtagtggtagctcaaaagttggggaattgttttctaagtgtggaccttggtctggtcctagcagccttttcagttaatatccttagaggtttgtggtcaaaaagcagtattaaaggcccttagagctcaaaggactgtcattgcaggaaggaggctgcagtgtcccagtagcagtacataccatgatgagcgatgggcaggtaagcagcagagatggatgagggaagggaggcactgtgccagttctgtgtgtgcccaaacatgtaagcaacttttcctgaatatgccggtacaacccattttgtgtcctagctgtacctgactggaggagtgtggagcctagacggctcagatagcatgcaagagaccatgcagactaccatccaggtccctgtgcaggtactgactgggagatgagggaggaataaacagaagtatcatcttccctctcaccaaattgtaactcttgtgtcatgcagcatgaagatggtccagaggacgacccccaactagttggaatcactgcccggaacattccaagaggagcccagctagctgctgaaaacctgggcatcagcctggccagcttgttgcttaacaaaggagccaagaatatcctggatgttgcacggcagcttaatgatgtgcactaactggtctataggttacgggaacctggctgccactttctagtgcccacatctggctttcaagtgctctgtgctccctaacttggagagggtgactagcccaggagattgaaccacagggtgttgagacttccagagacacgaatcaccttggggccttgatgactgcgcctttcctcctcagtagttagggcttcatctctttagaaaaagtcagtgccaatctcgaatgtaaccaatgccactaatattaaaccagctctcaatgtggttgttttggtggaattggggaaaatataaataaacccaaagcccttttaaacctgaattctgagtctgggacttctctgttgaaatactttctaattgcctcatgttctcagaatgcatcccaggaagcaccgagcaaagagaaaactgcctcaattcctacagcctgcctgttttcagttaacagaacctacttgtattacagtcttgcccattcccactgctctaagggaacttacaattccactcccacctcccaacacaacacatgccaggtacatggctctaccacggagctatataaccccaaccccgggcctacagcaattcgaaattaatcaagacactccatcttttaaaaaaacagaacaaccatttaataaaattagcccattgaaactccccactacctaaggttctaaacttgggatagatgcaaaattccagttcagaagccagtagaggctcagtccagatagggattcaccgacttgtgctggtatctaggtgtttgggttgtgaattgagtcgctgggaagaaaaggggatagctaggcccggctgccagtctcctgcggcaagaacacagctcttctgtccacaggcctgtaagcttctcccaaaccctttccaggaggcatcctggagaaaaccagctcatattacagtgattttgtcccggccacaccacacaccggccgatgaacgaagatggggtaaactggtatgaggccaacgaaggggaaaacacaggaccaaacaatatgatccatttctcttcaccaaagcctggtaatcaagtcacttctggaaggtccaggcgagggctaaagcaccaagctgaagaaaggacgcccgggttgcagctgcagagtaactcaccttcaggcccacctcagccgtacgtcacagcaaaaggccgacacttctggaaggtgtcgcaacctctccgcgcggcccatcgagacggagaccggcgaagctccgcgatggataagtaccgcggcgcctgacccggaggccgtgcagggaaggggaggcagaaacgcgcgatggcagagaaaggggaagagaatgggaacgcggcggcccggcccgcagccctaagtggctcagctctttccgtgagggaggtggtggcccttaaaagggcctttgtggaggtgtggggagggctgggcggccacggcgcgggctccctcagtactcctgagaggcctgggtggccttcttgccgctcgccggcgccttgggccccacggtggcgctcgtcttcttgggcagcagcacggcctggatgttgggcaggacgccgccctgagcgatcgtcacgccgcccagaagcttgttgagctcctcgtcgttgcggatggccagctgcaggtggcgcgggatgatgcgcgtcttcttgttgtcccgcgccgcgttgcccgccagctccagaatctcagcggtgaggtactcgagcacggccgccaagtacaccggggcgccggctcccacgcgctcggcatagtggcctttcctcagcagccgatgcacgcggcctaccgggaattgtagaccggcgcgcgaggagcgcgatttcgccttggcgcgggccttgcctccggttttaccgcgacccgacatcgtatacgaggtagaaagcagagagcaacaccgacgacgaaagaaaactgccaaccgccgcagtcaactgtcgccgcgcgcgggcgagctcgcccttataaactccatggacacgcccccgcctccccctgattggctcttttccccagtaccggcctctggttggttggaattaacccttcggtgacgcgcctaggcgaaaagagctcgcccagcgattggtccaatttgaaaaccttttacccggggaagaaagcaaggcggagtggccgcaagcagcaggctaatcatccatggaagtggccaatccttattaagcgcgcgaaatttaaacgctactgcgcgccaccagaaccggaagactaggaaggtggagtctggaggcgcatgactgtctctgggaaatctgggccggccaagggttttaaagtaaaagggttagccgagcgatagtggtgcacacctttaattcaagcactcaggaagcggaggaagggggagctctgagttcaagcttagcctggtaacaaagcgagttccaggacagccagggttacaaggggaaaccctgtttcgaaaaacattttaacaaaagttaaaaagggaaagagttctccttccaggtcaggggcactcccacgccctcctcaaatttggcaaagggagggtttaaaggagaagaaatgaaacctgagagtacaatcctatgccagaaaactgagtgctgtgatcctttgtgctacgacaagttagtattttaatatttattcaacatgttctgtctggtttcagttctgtcacttcttgcaggaaggggtctgatggaacagaggtaggtatcctcttggaaagggtacccaccccaacccttccaatcgatcctaaaatgcccatacgaaagataaataggggatagatgtatagatttattcagtggtagagcacttaacaaagttcagtcctcaggccggatgttggttgcacaagccttgtatcccagcactgggagacagaggcaggtggatctctgtgagttcgaggccagcctggtctccagagcgagtgccaggataggctccaaagctacacagagaaaccctgtctcgaaaaaccaaaaaaaaaaaaaaaaaaaaaaaaaaaaagagttcagtcctcaagtatctcaaaggctagaaaaagaggttgagggagagaagcaagtaaaagacaatcctttattgtcaccattttgagcacatggccctgcctctgatcttcctaatcagaacacttaattttaaagtcaaatgtgaggttaccttggagtatagggccctaactctagcacatagcccaggttctctctcaaggtccagcaaatgcagggctctgaaagttgagctgtatttgcataagagctgctacatcccccttatggtgctgcagatgggacagaaaggggaagagtagcaagctgaagaaagccaggggcaaagtgcaactaatggactttaaagtccaataaggtccaggccaataatcattacaggtgatgggagaagctgaaaacaaaactgaaaaaaccaacagttggagaggcctggaccagaaggcagtcttggaccagacaggttggtcctgggtgaggtccaacggaggctatgggcagtcagtcttcagggaactcagacatcatagaagagtcggacaagctggtatcgaatggagaaggtgacagcgctgctcaggatctagaaggagaaatggactggaataagaaccaaggtgaacttgagataagaacacttacataatttaccccaccctcagtgttacctgcaaaagcagcaggagcagtgtgaggtttctctcatgtatgggcccaaagattttgagtagcaagttgatgagggtcatgttgttacattcagtgaaggcaccatcctcactctcgcctcggtgaactgtcactagctggaggcgctctgctacctggaggggccagaggtgaagacaacttcagttacacatttcatccacaggggatcttcttgatgtttccaaactcccctcgggtctgaaaagaccagggattcccttttctcaagtgaaggatggtggcctggggccttacctccttgttaccttgttacctttaaaataaaggtgcccaagaaagagaggttcttggtcttgaacttggaatagctcatctccagtttgcccgtcttcggattgagtctgtaaagggaagatggtaccatgtgactgaatcatcttccaacctgcggttagtaagaggaccgacacttagcactgagatttgtttctggctcagctgcttacatctgggtgaagggaactgttgtaagcatcacactttatgtaagtaaatgtgcttcataaactaaaacggacgacccacatacagttactccttcttttcctccacttcctcttacataggagatggactggctggctttagctatcccaagtaaaaagctataatgaccctttggagccccagagcggctacctgggtatgcggtgtcgagggcaggggatggcgtgaaggagctgaggcagcgagtagaggaaattgaacacttgtggaataaagaagagtagcatggtcttgctgaagtgtcccaagattcccaccacggcaaaggtcatgccagcaaaataacagaaggtatctcccacaaacacctgtgatgggtacctgtatgggagagaggatctgagcccatggcaagagtcattactgacccttctttcacatcagacacaccaacaggctagtcctgaccctgagttctaagggaaaggctgttccagaaactctgcaggccaccaggccctaaaatcatctactcctgagggttccatagcatttattcccagctatggcagggtagacagcaattctaaagtaactacaaggctggctgtgtggttcagtgataaaaacagtcacctagcatgtacaaggtcatgaatttgatccccagcactgtgtgtgtgtgtgtgtgtgtgtgtgtgtgtgtgtgtgtgtgttaggggtgaggggtggtatctaatagcacatgccagtaatccctgttataacaattgaaggcaggaggattataaattcgagtccagccttgacaacacagtcacttcaatgccaacttgagtaacttaagtgagatccatctcaagaggaaaaaaagggggccaggaatatagctaagtagtagagtgcttgcctagcatttcaaagaccccagattcaatcccctgtaccataaatacatgaatgttcatgcttacacacaaaacaacaggaatggcaaaccactaccaatgggagacccagagaatacccaacaaaggtatgcatgattttagtctcttcattagaagctgggttatgtccagaccatctctcccacatatgccaatcatatgcctctcttatccatagatctacttaccagttatggtatagcaatcccaaggtggtaaaaaaaaatggtatcatgaagtagagggaaaagacatgatcatcccgataatcacctttggagcagagtaaaaggaaagaagttagtacccacattcccctatgcacctggtgtcttctgtgtctaatttatgttcccagccattaggaacacctcacccaagtcactttcaagaccaactctaccctaccctgcactgacactggtttccaactttccattacaggtatttgccaccatgcccagctctaacttgccctttcatgtcacccaggcagttcccaatattctattacttcattgcgccctcaaaaaacccgagtgactgtcttaaatgtggtttagaaattccagctggggtttgaataccagttttacttcctacctgtgtgaatttgaatatgatacactgaatctctctaagcttccattttctcatctgtcaaactggataatgcccattacacagagccatcatttgatttaaacgagataatgctttaaaagtgcttaaccttagctgggggcagggaaggcacacatgcctttaatctcagcacttgatctctgtgagatccagggctacacggtacagtcctgtctcaaaacaaaacaaagtgcttagttttaacaagcacttgttgatgtccactaactaaagacaaccagaaatatctaatagttaaacttgggtttactagaaactaagacttccaaaaccatttaccacagggaaccataaaccatctctctgaagggcttgttttgggtaatttggaagaggaagaaaggaagtagagacgtgccctaaactgggagctctcagaaggcatgagtaacttatatatatagtcatatatatatatatatatatgtatatatatatatatatatatatatatattattattattatcaggaggaagtcaggtatagtgagcattcctataatcacaatgctgagaagacaaataaagatgatcatgagtttgaggccagccagggttacatagcaagagtgtctcaaaaaagctataccctcgcatgttaactgagagggaatcctggtcatttttatattgctcagtgttctgggtttgtctgttctcagacatgattagaagggaggatctctttttttgtttgtttttgttttgttttgtttttgtctttttctactgtggtcagagggtgacgctttctgatgctggggttctgtgaaactatgtccaatagaaattcttggtctatctattcatgacactcaagctataaatgacagtactgctgtttttctttctcatgcttaactccttacagctgtttgcaaaatagcttccattctaaagttgcttttttgttgtccccttcccccaggaattctctaaatccacaccaagcaatcctcttaacacacaggtgtctgtttcttcctatctctaattccacctaccttccagctctaccaggttgaagacaatgatagaagcagagatgactagtgactgaccagcctctaggccattaattcctgctaggatgttgatggcattggtacagaacaccgcaagcagtcccatgtagacatagtataggattcctggggaaacagaatcagatagtgctacctagggaaggaggtttgcatctttttttgagaaaagagcacaggaggaatgaaaggatctgaataggcaagacctagtagcacaggtctataattccaactacttgaaaggctgggataagagggttaccagtttaaggcctgcctgggctaagaaagttcaaggcaacttagtgtgtgaccctgttttgaaaatttttgttttgttttcaagacagggtttctctgtgtagcatctccagctgtcctggaactccctctgtagatcagggtggccttgtactgagatgcgcctgactttgcctccctaatgctgagactaaaggtatgcgacaccatacccagctttgaatttttttttttttttttttttttttttttttggtttttctctgtggctttggaggctgtcctggaactagctcttgtagaccaggctggtctcaaactcacagagatccgcctgcctctgcctcccaagtgctgggattaaaggcgtttgacaccactgcccagcctttgaatttcttaaaaatgattatttatgtattttatgtatattggtactttgcatgtacatctgcacaccagaagaaggcatcagacagttgtgagctatcatgtgggtactgggaattgaactcaggatctttggaagagaagtgagtgttcttgactgagcaatctcccctgccctcctgttttgaaatttttagaaaatggaaaaaatagaaaggaaaggctttggtatagctcagagtgcttgtctagcaagcatgaggtcttagcttcaattccttgatacaggaaggaaagaaaagataggaaagaaagagggaaggaaaaagagaaatctgggttgatccagagacagaaagggaatacttgatggagaatgtggaccaccaggaagagtgttttactgggatctcagagggaagggtacaagtgggtgccacaggggcaatagtgataggaatactcacccaagtccaaatgcaggccaagaatccagcggaagggcttgggtaccacaatggttgtattgccaaagttagtgaagtaaaccatgaggagaggtagagaggcagctgtgggcagcagcagcttatggcgccagcgcagattgagtacatcatcagcgaagcccaggaagatcatgcagcagatggcaaggagggcacctatcagggccacaaactggggaaggctcaggcaagttacgtctcaagcctacttactagtctgcctttcaagaattcctgcctcctatgtttcccttttcccatctttttattttggagttgaggattgaacccgtggctttgggcatactagggaggctctatcactgagttatatatcaccaatccaagtactcctgtctctagagttgggcccacaagcaccctctgcccaatccaaataaccccaactcaagcaagtccccgaccccagccaaccgttcccactaatgcacttacttcatggtgggggaatgccttacactgctcctccacaaagcagttcaggaaggggaaagggatgaagcagaagaggatgataaggaaaacagcaccgcagatcactccctgggattctgggctgcggcccagcagcaaggggtggaggaggaagaggaaaggggcgtggttactcactattgtatggggttacaataacccaaagtgactttcttcccaggattttgttttgtttgtgagggagtagggagactgtgcacagggaagaggatactaccgctattagtcctgacacccaaagctcccatttcgtcctccccaggatagacaattctatcaccaccaagagttctgggttgcctaggttagctctctcccgccagcgcaaagccaagcacctcagtcctcgcccctgcaccctgtacaacctggcaccctaccccagcgcactcatgtgccgttactcacatctgctgccggctgagcttgttgaggtcctggccacagaggcgcgcggcgataaagtggctacggaaggcagggatgagggtcacagtagccacaaatcccagcagcgagccgaacaaattcaccagcagcggcagcggcaactccgggaaggcccacatggtgacccgccaggggccgccgctccgccgccaactgagctaactagcaacccggcacaatcccagaggcctcggcagtcggtagagccgcttcctacacgcaagagtattccgcgccagcaggaacaaaacccaactatgacctgaccctccctcctgacctgcaagaggttctgtgaagcaacctcggctctgccccgctgcacctacccattgtttccgcccggatcttaattgcaaaagaactatcgctgctgaagaccgaggcaccatttttaaaacgggcaccagagccggacgagtggtgttatttttaaactaaacttttgttggagaggagcggcatcattagagttttggaaactcaaccgaagaaaagataagtggacactctcggaacatcatattgtacagctcaaagagtaaatacgctttgcccagttccaacatgaaggcttccttgtaccacgtggctgactgacacagcttgttctgtggttccacgtcgtcccctcgcaggtcgggcttaaagggctagcagcctaaacttaatctgggatgccccggggctgaaaatatggcaccgaaagcctttggtcaggagggaagagagtgtggaaccacaactgctctttgcaggaaaactgttgccaaacagcaggaagccaaggtaaacacactgcttccagaaacgcagccacaatttgaagggatttttgtaaattcgaaagctcagacactcgaaaagcccttcccatttttttttttttcttgttctcgatccaggtactttcccctcaacagcccacccaccttctgcctccactatagcagtttgttgctgggcaacccacggctgcatttcgccagtgagggagctgtttgtgcttttgggtattggattgaaacagggactttaacttggtgtttgatcacagcattgtgccaagctctcaaaacacagagacaaactgaggctttgaaaagagctaaccaggcaggagaggttaaccacacctccgttgagcctgtgggtctacaatcaggtttctgcctccaagtcacttgcctttggacatctgttctgcagtagcagttcactgaaacattgatctcttaggtggcaaatgtttttcattcctcagagaggagtccaccacagagaattggtgacaatagcatggcattttgagttgacaatagcaaggtattttgtccattccttttaaatgtagcatactcctagagtcagggtgagggtgacactttttaggtcaaagataatctttctttttcctcaaaaccaggtatgaaatttcccttctacttgagaatagctcttggtctctctctcatacatacgtaaatacatacaaatttactcaacagtatactaaagtttgtttttctgtgtgtgtacacattcaagcaaacaccagggaggcaaatgtttctccttctgctgttgtcccctgagggttaggacacaaagatatctatgttccaggcatcgtcgagcatggtgattgagtctagagaagatataaagaacaataggagtatacagaagtgagagggtcctggggggtattatcttataatatttctgtagtgaaagggtaagggtcttccaaacagggagagagatacatggagcaggtgggaaggcggggcttgtaagatccccaagaggagggagcattcagctatcttgttgatcaggagtaggctgagactccctggaggtgtgaggaacagtctgtgtcttttattattattatgtttatttggaggccagtcctaataaatcttttccaatctggcttaagccctaaagtctctttgtgtccagaaatcagttacccaccacccacctggaagggtgagaggacttatctaaagacacagcactagggattcatcagcgcatgtacatgttacatcacaagtgattacttgaatacttgtcatataatctgaataatttcgctcccatgatggtagcactcccttgattaacagagaaagaaacaaatgcatggctcacttgaaatttgtgtctctcctggtaatagtctaaacatgtgtacgaatcctgaagagtcagtcatcagtcatcactgggactcacagatctgctgagttgcgattgtccctgtgctgagcagacagcacacatctaccaagcagctgagtgcctcccagtaagcaaggccaacctactattaaatcaatccactgacaaagcctagctcagaaatgtttctccttgtgtgaaaagaccacctgagctctgcaaagcctggggctctgaaacttgcaggacctgcccgtggccctgaccttttctccctacctttctcctttcactctagttagcaaaactcatcaactggaagtaaaacccaacatctcctgggccgaaatggatttttaaaaagaggaaataatgtagaaattcttagagtccactcagctggtctagaactcactgtgtagagcagcttgaccttgaacttgtggcaatcctcctatgtctccctctggaatgctggtattatacatgccatcacatccagcttagagttctggttcttaaacttgagtgacaataggaattctagaggttgggaaagatgctgaagcacacttctgaacagggcagacattcctaatactactacaaataaaggaaggaaagtatggattcaaatgatagccctttcctctttaaagagctccaacaaattgaatactaacaaaggtcaatctgaaatctaaaatgagtggtaatcatcaacttagttttatgctgctcatggcatttggtcttagtgttccctttgtagtaagatatcttctcttctctaatttttgttttatttgagactggttcttgatatgtagcctagattggtcatgaactcagaatctcctgccactacctcccatgtgcatgctgagattataggtatgagccaccatgccctgtccaagtgaagctagcctcggaggctgagtctcagccactgaagtaccacttatggtaggtcaccttgatagaacctttgttccccactttttgcagtgctggggaaggaacccacagtcttatgcatgttaggccagcctcttatcactgagctgtactccaaaccttactgaattattttctgttaagacattttaagacagggtcttacatatccaggcttgacttgaatttactaagtagtccatattgccagcccggccttgaacttctgatctttctaccttgcttccacctcctgaaggttgagtcacaattgtgtgccaccatgcccagtttatgtggtgctgaggtctgaactcaaggctttgtgcatgctaatctagcactttaccagctgagctagacttgtagttccttgataactgagatgggggcatggtggttgcacccttttaaccctagcactcaagatgcagaggcaggaggacctctatgagtttaagggcagcctgatctacatagggagttccaagccagccaggactacataacacagcaacaaaaatgacagctggtgctgggcagtggggacacacacctttaatcccagcacctgggaggtagaggcagagggatctctgtgagttcaaggccagcctgctctacattaaagttccaggacagggtccaaagacacacagaaaaaccctgtctttaaaaacaaaaacaaaaacacacaaaaaatacaactggcaaatgtctatggcataagaaactcctaagtgctatagggaatacagtgataaaaaatgcagttgctgccttcaaagactacttcagcataattaagatacattcattgagtatgagggaagagaaatgagtatgacatcatttctattctgagtttcctaatgagtaaaacaaagcactcatataagcacccagctaaaccataaagcaaaatgaaataagcactcaaaggctaagtaataggtggaagggagatgtggaaaccaggaagatcacacaagacaattttgaaacaggatctggcaacatgtaccagatctcaatatagatggttgttagccatcatgtggatgctgggaattgaactcaggacctctggaagagcagccagtgctcttaacctctgagccatctctccagcccctgaaaactttttttttttgagacaaggtgttaatgcacagttttaactgatctagaacttactatgtagaccaggctggcctccaagtaatagatatcagcctgcctctgccccccatgcccagtttggggactaaaggcatatgccaccatgcccagcttccctatatatcccaggctggccttgaattcactatccttcctcagcctccagggtgttgggcttacaggtgagccactactcatcactagattgctagagaatagagttcttgggagctccaaatattcccgaagaagaattcttcatggaaaacgaccttgcatttcaacagtttctcacattgcttacttccctgaacatgactcttcttctcactgattccttcctcctaggttatggtccaaagttatgtgcaccattgattccatatcttctactcttagattaaagactgggactgtaggggtcgccattggttttggggttcacggtgtaggtcaggctcaaagcaaatttgccttatcatctcacctctgcccatcgttccttacagtgaaatcagggatgcttcaagctacgtaacctttcctcttctagatcagaaagctctgttgctgacagtgttctacctagccctacaactctcaaccatgtaaagcattatttactcttagaggctttctccttagacaaatagatttgaaagatatttaacatcttctcatcctgtcttgactgtagaagggattgtatcaaagacctcaccatatgtcatgaagagttcctctgagtcttttttgtttttgtttttcaagacaggatttctctgtgtagcatggctattgctggaggttcttgtcctgtcaggtcctgctgctcttctcagccccaaataaacacacagagacactatattaattattaaactgctggccgatgactagggcttcttattgcctagctctctcttaattattaacccataactactaatctatgtatttctacatggtcttggcttactggagaatgcctggacctgtaactcctttgtagtctacatggcatctgtttttggtgcttctctgccttcctttcccagaattctccttgtctcctagccccgcctatcttcctgtttctatcggccaaacactgttttattcatcaaccaataagagaaacatatatacagaaggacatcccccatcacatggctgtcctggaactagctctgtccaccaggctggcctcaaactcacagagatccacctgcctctgcctcccaagtgctgggattaaagggctacaccaccactgcccagtctctgaatctttttatagacagcttcccttgtccccaagaagcaaagatgaactctagtctttcaggaatcctgagactgtaagttgtgcagtgtccctagaacagcatttctttggagttggctgggatatgacatatttggcttgtggggtggggcttgctataacaagttctcacccagcttggtttcagactcctcggctaatacatcatcctgcttcagcctcctgagtagctaggactacagtcaggtggcactacacgagatgccacatatttggacgagagtcttttgaccaaatctatagatagcccggtgctacaatgccagctcccttctctttaccatcccctctacacgtgctcgacaggcaagagctgttactatggaaatgtattatttttaaaaacagacagccctgggcttgggaaatatctcgagaacaaacccacgcaagcaaggaggttaataggggggttcctgaatcctagctccaaggggaaggaggacgatggtagtgttctattctcaacctttaccagattcaggttcatttttctcgccattggtattagcttttggacttttgccaggcacctctatctgggaagggatacctaacccctgcttacccagggcctagcttcaaccaaggaataagaccagaagctgctgaaccaggtattggaagtgggtggtgatttccaggggaccaactcattcttaaccgcacaggcgcccaacctgtagaaatctaagtaagatgtttaagggaaaacaggcggtatctcagataagtgaagttcccttgcctggtaatgaaggggtgcgcccggatttcagggcagggcggggcagttaaagactccgcctattttcatcccggaaccctctacgtgtacagctcaactccctgcccatcctctagctctgagcgcctggctggctaggccccgcccggtgcgggcgcggctcctttaagggtgggtgggggcggggcgctggtggtgttgtcagtgtcagttctgcgcacgcagccctcccggagccggtgccggcccgcgagccccggtgtctctgcagaccggtccccgcccgggtccagccgggcccgcgccgcgggaggagtctggtggtggctggcgagtagcttgggtcacatcgcaggacctagcgacccggatccccgcctgcagacagagcccaggcgtcgcgaccccggaggacctctgctctatccgtggcacctactggtcctgggatctccgcggcgcctgtgaaccccggagcccgcgcgctcagccccgggggagctcgcccacgccccacggcccccctgggccatgctcccccggggcagcggctgagcccgagccaggacccgagcccgcgggagcatggatcccggctgggggcagcgggacgtgggttgggcggccctgctggtcctctttgccgcctcgctggtcaccgtattgggctggctgctgcagtatgcccggggtttgtggctgtcgcgggctggtgggggccaggactcccgacccacctcagcctctgagcccgggggttccctccgggagctgggtgtgtggcgttcgctgctgcgtctgcgagcgacccggaccggcgcctcggaggaagccggcgtccggggcctcctggcttcgctctttgccttcaagtctttccgggagaattggcaacgggcttgggtgcgagccctgaacgagcaggcctgcagggacggggtgagtctcaccgagtccctgtgtctttcctttagctttgccccggctagagaagaggctcctcgtgaggagggctgggttagggctggggatcaactggaaagccccatagctttctctgatctttcagatcagagaaaagcgagcaggtgaggctggggggggggggttgttgtagaagtccagttatgtaccaaattttctatttttatgtgcaaggtactctggttccaaatccagtacaagttactgttctcatagcaacactaatccgtgtgcctgagggcacttccgcctagactgggctggctgggccaagagagacaggtgaacctgcagaaggaatttgcctggttctcatgccaccacaccccattaagatttcaggctcccaaaccctggtggtcaggtacccctcctccccacgccaaagtaactgaatcattcccccatctaccagcaatttaactacttcagtcaaacattctcctcgtccaggctggcctgcagtgttgaagggaaaggcgttcagttagagggcatgttgatcagctgtgtcctttctaataaatgaacttgggctgccccttgagggtcagtcataaaccagctcagcctacctccacccgttgcaccatgggcatctggcctcccaggaagtgggtaggaaatagagtcatgagaccgaggttgggtggaaggcagatgtctcctttttctggcccagcaacctctcctggcccccagtctatcagctcctttcttagagacctctctctgtatctagctataagagtttagagcctttgtcctgctcatccagatgcctgggaacagaagtggctccaagaagttgtcttgtttctgattcccagctggccagctgaaagccagatgacatctgtcaggttacacattgaacctacccctccaacctggctcttcctgtaccttgtccctgggacagctgactcagctggacattggcctctcgtgtggggggggagggaaggggaatctagattctaagagctcatcttctattcactttagcacgacttttgaagaagacagctactatagaagggaaattgtcttccctggtttgccaggaaagtgaatgaaccctgtgaatttgttttctgtatctcaaaccttgaagacaaattgccaacccaggctgtaccccctcctcaattcttccattctgttttccactgctgtagaagaattagggggtggctctttcgagagctaagcagctttctgctccctaatgccaccctgatgtcctgtctgccttaaggaattaaccaggcctgggatccttgagccctccctcaaagcttgcttctcttcccagcacttgtgatcgagtttcccctagccatgctaagtcagtcttcatttctaagaatttaggcagagagatatctttgaccattcacatcctgtttatttatgaaaaggcatagccttatttctccatctaattttatagcaagtgacacaccattttcatccttagcctagccctgcccagctacagatggcaatgaacatgtcaatttgtcgttgttgttattgtttacctttatttattattagagtgaagagttaggtggagggagagcagagagattcctgggatttgaagaggtatccaaggttcaaggcaagcttacctccaaggtagtctagcttccaggttcacagcagccgcttagaagctgcagatccctggagacagtggggtttaagagaaatacgttctattctaaagtcctgagccaaggagcagaaagaggccagcctgtagttgaggactctgcagtgtgagagttcagccagcaattgagcagaccagctctgaagagacagctccagagacttgatcttgtgcccatattacctcctcagagctccatccaaatcacctttgaggaggtaccccaactccctcccagagccagcattagtcatgtgacctgcaaagaccaatcagagcgtaccatggtaagggtctggtgggcactacctgatggggtggtggtggtggttgaccccaaggttccctatagtctgagtgtttttaattttgagtttctgtgtgctttacggatctaacgatttgtttcaggagatctaagaatctcactctgtgtgtgtgtgtgtgtgtgtgtgtgtgtgtgtgtgtgtgtgtgtgtgtgtggctttggattttatctaattcattaagaagcttagggccccaaaaggtgacaccccaaggaaaacagaaatggggaaggttctgttgaagcaccatgggtcagggcaaagccaggtgagcatcctcctcaatgcctgacactgcctctctgtctcaggtgctgcactgccagctctctgctgaggaggtgtgctttccagtctctgtgacccagcagtcccccgctgccgtctccatggagacctaccacgtcactctgacactgccaccaacacaggtggagggaaatgtgggaaactgagttgggcagaggacagttgagttggcacagcacttttcttttggttgctctttgggatggaatttgggaagaaagggtcctgaggagttagcaatgaggccttggaagaatgaggcaggtcttcctaatcctcttgttcttgtctctagttggaagtcagcctggaggaaatccctgatgaggggctgctggtgtcctgggccttcactgaccgcccagaactcagcctaatggtgcttcctaagctgcagaccagggaggtaagaagggggcaggcagacaagagattgaactagcagtggagcagagcacaggctccacctcttctcctctccgcagagagatgaggaaccaacagaactttcaacagttgaggaactgatcaaggatgctatagtcagcactcaacccgccatgatggtcaacctcagggcctgctctgccccaggaggcctggtgagtgaacatccaaaaagcaagatttgcccgtgtcccatctcccgtcctgtatcaggattattgctatttttacctccttctgctcctaggtacccagtgagaagccacccatgacgtctcaggcccagccacctatccccagacctacccgattattcttaaggcagcttcgagcatctcacctgggaagtgagctggggggtaagaactccattgcctttgccgtaggtacaagcagccccttcccctctgccaaggacatagtttctctgcttgagcatcctctaacttctggttctttacaggtactgaggaactgtgctgtgcagctgagcttgacaaccccatgcaacagaagtggaccaaacccatgagggctggtcctgaggtggaatggacagaggatctggcactgtaagtcatgctctgctcccaacctgttcccataggcagtcaggatgaagaaacctttccaggatagtcttggcatgagtcagccagccctgctttcagtagtagacctatattgtatgccaggtccttggggatggagataaagagtagatatagtgggtagatcacaggcctgaaacagaggcagatgtacctagggcagataggacagtgtgccagttgatatttatgaacagcataccatgggagtgtttagttccattcttataatggaataaagatctgatgaggcttcatttaggaggtacatttaaatcataccttcccgggcagtggtggcgcacgcctttattcccagcactcgggaggcagaggcaggcggatctctgtgagttcgagaccagcctggtctacaagagctagttccaggacagcctccaaagccacagagaaaccctgtctcgaaaaaaccaaaaaaccccacaaaaaacaaaaaaataaaaaaaactatacctttaagcaagcatatcattgacaagaatgtgaaagtcttgactaaaaaatgaagggcatcttcagactgagagagacgaggtggaagagtgatgggtgatgtgagtatctggctgaggaaaggggtttccactcgtgacttgctccatactcctaggaaaatggacgacttggaggacagcatagtttggttggagccctggttctatgttatttgcctaggtctctgcttctagcccttgactgactcaagagtgggttcagtttgctaaactgaacccttctctcctgacctgtccatcctcttttggtcttcagggatctgggtccccagagccgggagctgaccctcaaagtgcttcggagcagcagttgtggagatggtgagtgtggggcagaaggggcgcttcagagggggtgctaagcaggtcctgctcatgggcccagctcacagtgtcactcctgtctccagctgaactccttggtcaagccacactgcctgtaggctcaccttctaaaccactgtcacgaagacaagtgtgcccattaactccagggccagggaaatctctgagcccagcagccactatgacagcagaggtgagaaggtgaccactttggggagatggatagacctgggctggcagtctatgagatcctaaccccttgctgtctcctcaccctttggcagctgcactatgagcagggttcccctaggaacctgggcacacccacctcttccacccctcgccccagcatcacacctaccaagaagattgagctggaccggaccattatgcccgatggcaccattgttaccaccgtcactaccgtccagtcccgaccccgtatagatggcaaattaggtaaaaaggagtggctgtagtcagggcctgacagggaaaggggaaggaaagcctgaacaccagcacgtcttgtttcctgatgtcccattctgatcctactactctctcatctttgtctctcaaacttccccttgcacctctccatcccatcagctctcctctctccatttagtcccttggaatctgttagtctctcctcttgctctaagttcccttctttttttttttttttgttttttgttttttggtttttcaagacaggtttttctctgtgtagctttggagactatcctggtactgtctctggagaccaggctggcctcaaactcacagagatccgcctgcctctgcctcccgagtgctgggattaaaggcgtgtgccaccaacgcctggcagttcccttctatctttctatgggtgtcttttctttccttgaatctagccccgatgggctaattgtcccacttctactcccaaccctatgtggtctctgggctcttctagcaaacttaggggcttctgtgacgttttttctatctccagtggccttacatcacacttgttccatctctaggaatcctgtggcaattatccctatctccaggggcccctcaacattctccatatatgtttggtacctccctatataccctcaagtgggccccatggcactttcccacactgccactggttcctctagcatcttttccgtttgtacagcatcttcttaatcaccctgtgattaatctcccttaatcatccttgccctctgagtcaatcaaagtctgcatctcaataaagatagtaggggtgggggccattctaaagcacttcccagctcactctccctcccccacccaccagactccccctcccgctccccgtccaaggtggaggtgactgagaagatgacaactgtgctgagtgagagcagcggccccagcaatgcctcccacagcagcagccgtgagtggggaaagggaatgagcattggcgggccctaatgcctctgtagtcaagagctactttgggtggagcaagaggagtttgagtccaagaagtcaagtagaagtcaagctatgtatcctctgcatcccccagcaggggagagccacctttctaatggcttggacccagtagcagagacagcaattcgccagctgactgagcccagtgggcgggcagccaagaagacacccaccaagcgcagcacgctcatcatctctggtgtttccaaggtaacagagctctagggagagagctaagatggggaaaaagccctaatgggtcattcttgcccattaaaacctgtccctcctggcaggtgcccattgctcaggacgagttggcgctttccttgggttatgcagcttctctggaagcctcgatgcaagatgatacaggaaccagtggtggtccttcatcacctccctcagacccatcagccacatccccaggacccccagatgccctctccagtcccacaagtgtccaggaagcagatgagacgacacgttcagacatttctgagaggccatcagtggatgatgttgagtcagaaacagggtctactggtgccctggagacccgaagcctcaaggatcacaaaggtgggtagcaaaggacaggtagtcctccttactatttttctgagaggtggggctgagacagagtctggcctagaactcaccatgtagcccaggatagcatcaaacttgaaataattcttggtcttagtttctcaagtgctaaattttaggcgtagcatactcaggtgtcaccgtattgtcacctcagtcctgctagacaacttgaaggcatggtaggctcagctaacttgcccttcgagggtcaggcaaactcaggtagagcaaggaacttggtgcttcagtttctagcctgggtatgacaaactggagtgacaacaagggaagtcatcacaattatctttcttcctgagctaacaaactttttttctttcacttgtctttgttgtttgaagaaagggtctcatgtagtcaaggctggctcaaacttgctatataccgaaagtcagcctaaaatatctgatcctcatgcctctacctcctagttgttaagattataggtaggcactagcatgcccagccattcttttttaaaattgttacatttagttctttattttagtgcgtgtgtgtgtgtgtgtgtgtgtgtgtgtgtgtgtgtgtgtgtgtgcgtgcgcgcgcgcgcatcacagcacacaatcagaagacaactgcaggaatttgttttctccttttaccatgtaggtacctgggattgacctatagttgtcatgtttggcagcacttttacctgttgagacatctttaacaatttttaaaaaatgtgtatgggtattttgcctacatgtttttctgtataccacaagtgtgcctggtgcccaaggaggtcaaaagaggttgttgaatcccatggaactggagttatggacagttatgagctgccatgtgaatgctgggaatcaaaccttggtcctctggaagagcagccagtgctcttaactgcttgcgacatctctccagtgccctgctgagatataagcttccatgccaaccttaaaattgttcctctgagccaggcatggtggcatacatctttaatcccagtactcaagaggcagaggcaggtggatctgtaagttcaaaaccagtctggtgtacatagtgaggtccaggatggcaaagaatacacagtgagactgtctcaaaagagagagagagagagagagagagagagagagagagagagagagaggaagaagaaagaaaagaagagaaaagaaaagaaaagaaaagaaataagaaagattggtcctctgaaccagggatggtggcatttagctataatcccagcttttggggctggagcaggattttgaggtaaggccagtttacaggccacatattgaagaaaggaagccaggaagcatttgccctctggtggtgactcaggtgcaaacagtattcctaacttcagaggacagagtttgcatcttcaccctttgaccaaggaggctgtcagctgtggtctatttgtgatttaaaagctagtgtggccgggtggtggtgcacacctttaatcccagcacttgggaggcagaggcaggtggatctctgtgagttcgagaccagcctggtcttcaagagctagttccaggacagcctccaaagccacagggaaatcctgtctcgaagaagaagaaaaaaaaaaaaaaaaaaaaaaaaaaaaaaaaaaaaaaaaaaaaaaaaaaaaaaaaaaaaaagctagtgtgatagtgcacactgtaatctcagtacttgagagtctatggcaagaggatggtgatggctgttagtttaagatcagcctgggttacctaatgagttcaaggccagctagggctacaaatccagattctgcctcaaacaaacaacaaaaaagaatttcaattgtggttcacatcacttcttgagataatggaatttttaagcccaaagcctgctgtgtaagcaccttcctctctcttatagacccatatttacctctttgaggtttctagaagccccactgctcacaccctggaatgcagtatgttaacccatcttcccttttatgatttataggctttgaggaacaccctctgtgcagcctctgtctatccgcagaaggatgctcagtcccagcatgtcctccaagaacagcagccgctacccttgttattctccctggggatagggtcagaggtgcacacagattccctcccccagaatgtcgttcctttctcagggtgggcaaagctcatgtgtgcttccacttccttttctgaaaaagacaggcgttaggcaagagacttcccattcttcatttttctccatcctcaccccattcctgtgcccctccatctgcctcagtttccctttcttcctcacagtgagtttcctgcgcagtggcactaagctcattttccgccggaggccccgacagaaggaagctggtctgagccaatcacacgatgacctctccaacacaacggccacccctagtgtccgaaagaaggctggcagcttttctcgtcgccttatcaagcggttttccttcaaatccaaacccaaggccaatggcaaccccaacccccagctctgagaaccccccctgaactaggaaagggcaagagttctctgagtccattccccacatccccttctttaccccttcctggattcccagtgctggggcaaggaaagcccttgggttctaagaagccccagcactctgggctgtggggtaagttggaaggatgtttgacatgggaagcatttgagaggcaggcactcattgctgtggacataggagtttggcagctgggagtaaggggcaggctctgtcttagcatgtgtgggcattctttagaagtctatgccctctgctggtactgcccccagagaggagccctggggtactcatctcctgggcagatccttctcccttatttattctcttttctatttatatgtgtggtctaggacccttggcaaacagatgctagagggcatctctccaggtgacccttttctgtcccaggagggtaaggcaagttccaggaggggtttctatacctctcttcggggtccccacttagacgagcaccagtgtctgtctcaggaagacattggcagatcataggaatccgggctagtgcccaggatggggggcaggtactccccacctccctacctcccacactgctcctcttttctccttccctttgttaccattttgtacttgatgccttctccatgagcagtggctcagttagaaggagggagccaggaggctggtaggaagccttccctagagagatagctttaggagctttaaagacggtatgatcatagagcaaggttgcacctctgtatgttgggggatgatgatgtccattgctgtgtgatggcttggaatttaatttatttaattaaagtcaaattggagtttataaaggagaactgctggcatcctttgaaaagcaaacaggaagcgaggctgtggtattgatagaggaggaggatcactggcactaacccaagtagtgaggaaggacagaagacaaagagacatgtagagaggtttgagtgacagcactctgaaaagcaaagttgccaaaagaaaagctaagcagctagttcacttgacttcatccccctctctcaaataggctgttctttctaggacataacagagttcagagtatagactctggacctgaactgttttgatgtgagacccagctccactggttacctttgtgagcatggccaagatgggtgctcagtttttatccagagtctcacctatgttccctagctggcttgtaactcctttatgtagaccaggctgtccttgaactcagagatccctctgcctctgccttccaaatgctaggattaaaggtgtgtactagcacacctggtggtgtgttcagttttattttttcctcttctttaaattggggattatgggtggggctgtgatggcccacacctttaatcccagcgcttgggaggcagagacaggtggatctctgagtctgaggccagcctggtctacagagagagagttccagggcagactccaaagccacacagagaagccctgtctcaaaaaaacaaaaaaagagggggcagaatatgggctggggacatagctcaaaagtagaggactatcctagcatactcaagaccctgggatttgtttaatcattttaaaaagtgggtgtagccaggtgtggaagcataaacctttaatctcagtacctgggaggcagaagcaggagggtctctgtgagttccaagccagtcagggctataatagtgagacctgtccaaaataaataaataaataaataatatttctaacatgggtgagtgttaggtacctacagttatgtccctgtttcctgtcctttgagatgtcacacaggacttgaaccaagtaagctgctacagaaggttgtgcagaagcagggtgttctggcccacgcctttaatcccagcacttgggagacagacaggttgatctctgtgagttcgaggccagcctggtctacagagtgagttctaggacaggctccaaaacaatacagagaaaccaacaagcaggaaactaggcctgccacaaacatctccttatctggcacaagctacttctcctttctggaccccaatttcttcacctctataatgagaatggccttggataatcaggtcacttctaacatttatgtataacttactcagaactgggtttgtgaatagacatcatggattacaaccccccatagcccaccacctgcctctgcctgccccctacacagggtcttgctatgtggctcatactggccttagagtttcccagtgcagagaatacagatatgtgccatcatacttggctgttacttgttttgagacaggatttctctgtgtagccctggctgtcttagaactcactttgtagaccaggctggccttgagctgacagagatccacctgcctctgcctctgcctcccaagtgctggaactaaaggtgtgcgcttccatcaactagcacacataaactcttccacttaattgtatcccaaatcccttttttattttttagaggtagggtctaaattaccctgactagccttgaacttctctgtagctcagactcacctttctccgttctagtactgggattaaagacgagttctcaggtctgacccaatctataggttttaatgaatagaaatgatgatgggtgggtggagttttagaaaacaaatctcagaaaatgtctggataatccagccaaagttgtagcttcttctcaataaaaaattgaaagtttccaggtggtggtagggcacatctttaatcccagcagttgggaggcagaggcaggcagatctctgtgaatttgaggccagcttggttcacagagtgaattccaggatagccagggctacacagagaccctgtttcaaaaaaaaaaaaaagatgaaactatacaaggcaacaagcctttaaatctggacgttactacccccacatcgtagcactaggattaaaggcatagctcaccacatcctaataattgaaatctggaaacatagatctataaaaatactgagatttgtgccttgaaaactgtttgagttcacatacctctgtttttcttcatggaattactaaaacagctaagtgccattctcggtactataactcttgagatgagggcaagcattttatgaagtagtgttaggatcatgaatttctaaattaataaggcagaaaaaataactgggtgtggtgacacatgcctttatttctagcactcttaaaaacaaggagaggtgggattgaagagaaggttcagccacaaagaagacttgctcctttagcagagaatccaggctcagttaccagcactcacgtggcagtttataactatccataactctagttcctggggacctgatgctctcttttggtgccaggacacacataatgatgcacatacatttaggtaagacacttataaattttgtttttaattttttgagatggtactgaggagattggctgtgttaaagagccctgattcctcttgcagaggacccaggtttgattcccagcacccacatgacagctcacaatcatctgtaactccaattctagggaggacctgatgcccgctttcggcctttgcaagcatggcacatacatggtgtacatgcatacatgcaggcaaacactcatagatattaaataaataaatcttagccaggtgtagtgcatacctttaatctcagcactcagaaggcagaggcaggtgatctctagtgaatcccacgagagactgttctacataatgagttccatgactgccagggctatttaacagtgagaccctgtctcaaaacaaaaagtctaattaaaaaacgtgtgtgtgtgtgtgtgtgtgtgtgtgtgtgtgtgtgtgtgtgtgagagagagagagagagagagagagagagagagagagagatgggggaggttctctatatagccctggctggtctcaaactcagagatccacctgctcctgcctctggagtgctgggactaaagatatgtggcaccatgccccgaagttttaaatacctattgagtttccctctctggactatgtgactgtgactggtttataaaagtgaagaaatagacacaagtgttcttcctcactgacttgtataaaatgcagggtagtaaacaacacaaatataatagccataataaggagatatataccaaatataaccaaatatttaaccaaatataaaaacagaaatataatataccgtaataaggaaagtcaattcttggagaaggaaccactgtcaccattggaaacacaagaataggtaggaagtcagttaatacaattggaaggggaaggagagattttcattcagagagaaacaagtacaaatcctcagaagtaaaagaagctactgtgcggcaaggaaactgaaatttgtggctgaggtgcagaaaatgaggttcaagacccaagataggatttgttgtaggcagggcccagatgttggagtttggagtttggtttggggactttgtactgcaggcaacagaatgcctttgaatattttcacagggtggtgacttgatcagatctggttttgttaaagatcactttactgagctccgtggaggatgccttgtagggaagcacagtggggcatattaagtgagtgtagaaatctggaatgggtgtcattcatggtctacaatgagaatgaagacaaacgataatgagtgatcagatgttcaagaaagaatccagggctgggtgtgtggctgttggtagagcgcttgtctagcaagcagaagtccttgattgaatcacctagcaccacataaacatggtgaggtggcaaaatttataatctctggtagagcagacggatccaaaggttaaggtccctgggcaaacctgttggcctatgcttttaatacccacgcttggactgcaaatacaggaggatctctgtgagttcaaggtcagcctggggtacacagaacagagaaggccaagaagatcagagataaatctagggccccaatgtagattcaccacccagccagcaaactaaactacagaaacattgaggtagaaggcacccacagcccactctaggcgcatgcccagtacgtggttgacgcggagtctgcgcagtagagggcattcaagtctcaaagcttcccgcctgcgcacagcctagacaaccccccgccccccccccactcccgaaccccctttgcgggtgacgctaagttctcccacgtccggtcgtccctcgctctaccccttgtgactcggagccctgtcccctacagttcccgcctcttccgtgttttggtgcgcacgggttccgtccggcgcagcggccattggctatccccgactccaaagcggcgattggctgtcgctggctgtctctcaaacgcctccgggtatatggtgtgaagtgggtggggcgccgggtatcccggcggcgctgccaggtgagtggagtggagaagctctggcgcttggcggccagggcagactctggagtctgcggaaggccgggcgtcctggagcggcttggcgaggcatccgagccggcccttagcctccgcgccctcgtctaggggtcgctgtggctggactcggtcagcgccacgcttgatgccgggggttccgggaagccctcccgccttggcgctccgggacggtctccttcctcctcggagttgtagcgatcctccgaagcgtggcccgggcctggccgcctaggtgagccttccctgggggcctgcccacggtcctttttgtgtcctgatcggcctcgtcgcgcgctttgttttggttgccgggttcagccgtcagatcctcgcctgtgagtccttgcttagaacctgggcccttcttttaaagctctgttacggctgagagttcattggtgccgagcgacactatgtactctcttgttg

SEQ ID NO: 10 - DNA, 47610 bp, Cricetulus griseus
  >scaffold_7 dna:scaffold scaffold:CHOK1GS_HDv1:scaffold_7:12057731:12105340:1
tgtgtgtgtgtgtgtgtgtgtgtgtgtaataagggcttagctccgtgcagcttgctgtgtgactcaggtaccaggggggcccaaaacaccaaacaaaacagtgacctgaataagctgtttgcaaattcaaaattgagcccggagattttctctggccatgacagaagcttgccaagaccttgaacgcagagtgatttggtccagaattcccagcagcaacctcagacaccaagttgctcgtccagcagcacacgctttttactggggaatcctgtacccaactagacgaggaccaagttcaagggctttttctccaaagaacaaagacctccgtagtctcgctcccgcactcagtggctcaagtgtgcaaggacccacacacccctccctactctccagcgcgggtcagcgccgcgcgagtgactactccggccgcgcccctggtgatgccgccgcagggcgggcaaagccttccaatggcgacgccaggctgtcatgctcctccctctctcccgcgctccaccctccaccccctgcgttcctaactccctcctccccacaagcttctccccgcgcgatcctccccttccctgctgctcctcccaagtcgctcctccctacacactcctctccgctccctcgcgctcctccccatcactcctcccaacacgtacctctctccatcccccgcacttctcccggtcccccgcgctcctccctgtgcctcgtgctccttcccctccctcgtgctgctccccggcgctcctcccctcccgcaagctcccctccctcctatcctcgtgctcctccccctccctcgtgctctccctcctcctttttccgtgctcctccccctccctcgtgctgccgtctccgcgctcctcctcccgcgggagcgagctgtcagccgggcgggccggctccgtcatatgaccggccggcgaccgcggcgccgcaccttccgtctgctgcagcggtcccgcgctcgcgcccctccgggcggccgcgcccccgtcgccatggccccgccgcggccgccgtgggctgcgcgctgagccgccgggtccccgagcgtggccgcccgggccgccgcgtgcacgccatggccccgaccctgctccagaagctcttcaacaaaaggggcggcggtgccgcgtccgcccaggcccggccgcccaaagaggagcctgccttcaggtgagtgcatgcgagccggcgggaggcctgcgagcagaccggacccccgtgccgccctattcccctcctcccgggcgggaccccgcgctacccggccccttctccccagctcctcccgggagggacctctgtcccctctgcccaggtcctcttgcatgggaccccatgcctctgtcacctctctccaggtgggaccccggcaccatcctccctccttccaccatcctctttccttcctcccagagaccttccaggtgggactccggggcctcccagtcccctctctccaggtctttcaggagagctactaaccgccctgtcccctctctactgttcccctggggtgagactccagagtcgtcgtccttccctgctttccaggtctctcccctggtggtagccccaaggcgtcctctgccctttccccccaggtccccccgacacacaccccaacatttccctagatgctcccgcgtccaagcacctccggggggctttggagggaaagtcacctgcatccctccagcccccgctcccagcctgtaagctctcattttgcgggcagttccaacctactgagtatgtgacagtattttgaagttgtaaagggtggagccacgaagaaagcagcttctttcttgcagtgtatgacaagctcaccagcggaggaataaaagtgtgtaatttcctcatcagttacaaggctgatgctgcatgatgagtggaaagggagggaaatgcttttatgaaacgtctcagggtctgatttaacaaagctgtggcagatatttaatagttcatcatcggaacacatacctttgaattagcaagtattaagaagcttgctcacgatccacagctgtaagtggcaggtcttgcattttgatctaagcaatcgacttggaatctagtctttaaaatccctatactattattctttgcagtagtaagtttccaaagatgctttcctgggtcttatcctgtgtcttagcactcttaggttgagaaagtcatttatttgccggcgaagttttcatcataaaaaaaataattgaacactccatactgatgcaggcattctagtggtgctttttgtccataatgtttgcaaaagcagtttattgttcaagaagtctagagtcagttcaatacgccttttaaaagttaaagtgaaactttgaaatcattattattattttaatatttgaaacaggggtcttactttggtagtccagattggcctcaaacccttggtctttgcttcccaagtgctgggatcacaaacatgaggcaccacatttgaagtgaattttgattaaatttcatattctatattgcttaaaaatttatttaaaacacatacaaaccctcactatagttacacaagattttgtttagttttgtatgactcaagagtctcatgtaacctaggctagcctggatctccttattcccctcttactgcctctcaaatacatttattacaataaacgtgtgttgctgtgcctggcgccaactatgtgagaacgaaacattaaatagacttgaatttgtgtgagtggtgtttggaaggtaaattgtgagggttccatgtatcacagtcagtgtcattaccataaggcaaactgaagctggggattggggtagggaattctgtacctttttacttgtctgcctactagtgatgctgtgtaacttctcaaaatggtaggattactctggactcaggatttgtaatttcttctctttcttcttagaatcccagactaggtcaaggtacaaggcctggagagaaaaaggcatgtgtggtccaggtatcttcattttgacagcccttactaaggactttaaaaccacttgaatactgatggagttccctgcctttttgtccaccactactccctccatggataaagttaaatttggtgtattttgagtaacaacaaaaaaattgtggctatatttagggcttgtccgtattaggaaaattgattcccactttgtgagcacgttattagtatcgtgttctgacttctcattggtgaataaggaagaacaaaattatgccacataatctttaaatttttttgccattatatattcattagtgtttttgtatgtgcatgttcgtgcacatactcaaacaagttccacaacatgcatggagaggtcaagggacaactttcagtgctcacgtgggtcctgggactccaatgcaggtggatcaggtgacaagtactcttggctgttgagttaccttgacagtccccatgtagtatttcttttcttttgttcacctcagttttttatttttaataagattttttgaggcagatgtttttgaagaattttgaggtcccccccccttttttttttttttttttgatacagggtcttaaatacccagcctggtctggaagtcaaaagtctcagcactaatgtgatcaaatattggagtcacagatttgccatcatgctgggcacttgtatgacctctgttattatctgggctttccactccttcccttatcatcctatagttttcttgttgcctgtcggaggtaatttgttgtctggagtgagtggctcacatcccacactctttcccgaccatcacctgtcaatcatcacctacagagcatcatcacagtcaagattccttcttatccattttgtttacaatctggagaaaacgcccaccttcgtggaaacagaaaggattcgagagagactgagtttgcagtctgacccaaagcagtcaggaacagatataattgtaatatttctgaaacttagaccttgcttaacagtatagtgtgtttgatgttctagaagggtgtgtgtgtgtgtgtgtgtgtgtgtgtgtgtgtgtgtgtgtgtgtgtgtgtgtgtgtgtgtgtgtgcttcagatgcatgcagaagctttcagaggtgttaggtcctctggagctgcagttacaggtggttgtgaaacaatatgtgggtgctaagcaaacttgtgcccccctgcaagagcagtaagtgctcttaaccactgagccatctctctagcccctacataggtctttttaatggtcaaggtctatccagtgtctggctcatatttgaaatattatctatattacacccccccattgaggaccaaacacaggatctcatgcctgctaattaaaacattgtcttaagattgtttttgtttgttttgagacaaagtttcatgtaaccaaggctggccttgaactcttgagtcttctgtctctatctcccaaatgctgagatcaccagtctgtgccagtatgcattggctttcctgtattgttatgtatttatttactcattgttgggccctgaatctagagccttgcacatgctagtggttctcaggttttaattcttttggatttttcagacagggcctcatgtagcccaggctggtctacatgctgatcctcatgctgtgtcctttaaggtatttcagttgcaggcatgcactatcatactgggttctcgttttgtttttttttcaagacagggtttctctgtgtagccctggctgtctggaacttgctctgtagaccaggctggcctctgcctctctgcctgggattaaagtgctgggattaaaggcactgcccgattctcactttgtttttttttaaatatctctggttaatgactgcaccagtttccagttaaagggtggtgaagaagatgagctgctaaatgttgtcttttattctggattggttagatgatgggaacatcatgtggatactggggagtcaacgaaagcattgcagctgcatggcagttaactgagtgaatgccaccaagagggccatccgtgctgattagctgtgtaaatgtcaacaagagggagcttacttctttcctccggtcctgaatacctaaggccaaatggcctagttagtggtaatccccatttgttctgttagaacaattcaaataatctgttacagggctaggataaatataattaaatccacttattaccaaagagctgctaatgccagtttacagcgtggccttccactgtacaaagcctgctaggatgcccatggttatgtgccctagagttcagggtgtaaaggacaacagattatatactaaaatgaataaattgacatcctctaggaataatgacaactatatatgtaaatctgagagagaatacagttttatactcagttcaaaattaagaactcattctttgttactatggtaggcatatggacaagaccgccttccattatattgccagggggtagttatttctaaagggattattctaggtagagtagagaatattctggggggaaaaaaaaaacatggtttttgttccagtacaccctcaccgcctaccatggtgtgtgtgtgtgtgtgtgtgtgtgtgtgtgtgtgtgtgtgtgtgtgtgtgtgtgtgtgttgtgtatgtatgtgttatgtatgcatttgtgtgggcctgagtgtaccacaccatgcttctggtcagaagacagcctctggttaggtcctgactttctaccttgcttgagacagctgattttctgctgtgtttccactagttgatctgcaagcttccagggattctcttgttcctgctgctggcattacagacctttgtgctacgtggatggcttttatatgggttctgggcattcagtgtcttgtttttgtgtttccatggcaagcactttacccacgaagcatccccagccccatatattcacatttttaatgcccataaaataagactctgtagagatatccttgcctaccaacttacatctactggcttactcttgatgtacctccttgttttaacatatcatcacatattgtgagaccttattagtggttttagcagagatgaataaggaaagtgctatctaatgcccttagaagctctaagcccaggggtgcatgcctgtaattctggttttggggatgctgaggcagcaggatcaggaattgaaggctagtctcagctttgtagggagtctgaggctagcctggactacatgagaccttgtcacaacacaacaaaatacacaaacaaaaatagatcttggaagaaaaaatagggaagccatttagtcttgcctcgtgtaacatgttgccatgtagctgaacaataagtccatagattttctctgcttgtccagtgttaagtcgacggtaaaatgatacagtcctatataaaagactttaggtgaggtggtaataaagtgacttagaaaactttcggaaagaataaaatgcaaatgatttcaagtagtagcagctcaccttagataatggagtttagtattattctttggaagctatgctaaaaattgaataatttccaaagtctgctctcttcctgtgcagacttgaggcagttgaagtagatttttttttttcatttgtttgttttcacatcgttgatttttagccttgatgcagtgggtggtgaaacacagaccctgtgatttcagagaagcattaaatacaaatagcaggcagcgtttcagacctggacacatgtgactgactgcacattcagaaatacttttagtaacactaaaataaatcctttttttcctgagttatttgcacgttctttctcatccaaagcgtttggcacagatgaaatccatacttttgtagaatttagtctaaagggaaatagttccaccttggagctccgaatttgataggtatgtcagagactggattctgaagctacagcgtatcaatgagaagacactattgttgtgcagtacaggggtctgatgtgttcacatattttagtggctttgctcaacgtgtttaaacattttcacgtggtatatgttaattatatgaaacaattggtttcatactggcattctcacacatgtatataatatgctttgctcaaaatcatgggtttctttgtgacatttccaaaaatgtatgtaatgcgctgtcttatgtttagtcccctattgcccttctcttatctcccttctttcctcatggtttttatggtcaagaatgaacttttagtggagctggagatacagcctaattggaagagtacttccctagcatgcaggaaactctgggttcaaccccagcaccacataacctgggtgtggcaatgcacacctataatccagcactcgtggggtggagctgggggaagctgaaggtaattcttggctacatagtaagttagaggcgagcctggattacactagaccctacctaaaatttaacttcttcatttttgttacgataactgtaagttcttttcttaaaatgacatgcttgctgtgaattttaatgtattttaaacccaagttcaatgcaagtctcaggaggccagtttcattgcttcacctgcgtctgtgagcccaggaatggccttcctctagaattggagcatacttagttctgttgctgaatgcaggtttccccctttgctagcaatgtctttagggaaggtgtcacactctttttatgtttttccagaattcgaatgagagacctggattaattttttttttcctttttgttctttgttttttgtgcgacagaatctatgtagcccagccttgtacctgttgtctttctgctgaacctgcccagtacagggcttataggtatgagtactgccctgggcgaggttagatatttataaagccaaaccatgtaattatgtttttgttattgtttttctttgaggcatggtgtcaccgtgtagcctgggctgaactcgaatttgatgtgtaaacccgactgacttcacacttgtactgtatcctcctgccgtgtgctgttccaggcatggctactgtaaatcagtactgatacgtgagtgagtttgccatgctacacatcactcttggataaagtttgggggattgacatttggacctgggcctgtgcagagcttatagctgaaaggagaacattgttttgttttaaattgttgttagttcaggttatgtttcatggtttgcttctaaaggtcaacttaaggaagccagtttgtttcttggcaaggaagtttttgtaaaaaaaaaaaaaaaaaaaaaaaagatcggttttgcctctgctttcctcaaatgctttggctgtcagcctgaactactggtggatgaataggaggtaggaatggtaatgtattacttctctagctactgttctttttgtgttggtaaaacggggcacatgatttacagcgattacacaggggctttgcctaatgtgaatctttgggcctgggctctggggtcatgttcttggctataaaaataagttggtgagttcctcttcccccagcattctttatctcaggtttgtagaaagtgattattatataaaagaggaaaaacaggatggacttttccagctcactgggcatgtaatagtgatttctctccaccccaccccgtctgtaaatggaacatccatgactcaccatggccacacaggcacttttgtaaccctgcttgaatgggagggtgggatggggatggaaggagatgggctggcatcccctttgttcaggcagattctgtccagctgccattgtatggacttctgcagaggacagtgtgccttctcatacatcacactacagagctttctaaacagtgctttcagtttgtaccgaaagaatgcaatacaccagtgtaaggaaaatgcagccagtgagactgcaatgctgtgcattcgtgtgctgtagttgagtgctctactgtcacataagattttaggattaagagccagggagttgttcagatggttcagtgggtaaggaggcttgtcatcaggcccaggacctgagtccagtctccaagactcacatggtgtaagaagagaaccgactcacaggttgttcattgaactccacgtgtgtgccatgactgtgtgtgtctacatacatacacatacaaataaataaaatataatactgaacaaaattttagagatatttcagtattagcatgagtctgagaccctcacatttttctctaagctgtattcctttcattttgattatatttggattttttttttagttatttgtgcctgtgatcttttttttaaatcatgggtgtggctgggcattgaacctagggcttgctttctttatgttaaatgacatccccagcttttcaattaaaaagaatctttaaaagttgcccagactggtcttaaactctctgtatagcccaggcttcctggaagcttttcttttgaacacacacactctctctccttttgtcttccttggagtgagaagtcagaggacagcggtgggtggtgattctttccttctgtcatgtggatcctgggaatggaactcaggttgtcaggtttggtggcaagcacctttactccctgagccttctcactggccctctgccttgaactcttgatcttcctgtttcagcctcccaattgttggctgggattacagatatgtgctatcaaactgtacccatgatttgcttaatttgtaaattcagctctgaatttgtagcatatgattgtagagaggtgtgtgtgtgtgtgtgtgtatgtgtgtgtgtgtatctttgaaaaaagatttttatcaccttgcctataattttttaaaaaaatagtattttgggtttttttttttttttgtacttttgtgtatgagtattttgttttgcctgcatgtatgtacatatactgtgtgcatgcttgatgctcacagaggccagaagtgggtgttcagtcttcaggaactggagttacagaatattgttagccatcatgtgatttcgttgaactgaacctatatcctttgcaagaacaaacagcaagtgctcctaaccactgagctatctctccgggcctggacttttaaaaaccagaaatagagcgtgtctgtattacatagatctctaaattaatggttattggtgctttttaatctactgataccttataaaaaatgaaacccagtcgttaggtatctcagtggctatgggcaccggggttacagaaattcattcttccagagcccatggggagccagcacacctgctgggagcttgatctgatctccagtaactttagttgtgtgttgttatggcaattattacattttcacaagttggagacaggttagatgttaacctgcacatcctcaagagaagaaacaaggttggtttaagatgagttaggaaaaagctacaaaatcactcatcttgtcattgtagtgtttaacactttagatgccagctatctctctgatgtgcccagaaagttgggtattctcacgcagtcaaacctttggggcgatagggcaaaagtatgctaattatcatttagttcttagttaactgtatttattcgttattttatatgtttgaggagtagtaataaggatctcttttaaatttgacgtaacatctttttaatttaagcttcctttgaaagtaattacatgaaacaagaaaatggatttgtgcttctagggctgtggtaagagagttctgcatcccagccctgttactctctgaagcacttaacactgtgtggtaggaagttgtcagtaataagcacttggtcagggagtgaacaaatgcactgataggttctgaaagtgggtgatcctcaaaaactgggtagcattccagaactggactctgatttttggtttggtagtgccaggggtggaacccagggcctcaggaatgctaggcatacattctaacactgtgtcacactccaaccccagaatccagtttcttgaaatgttcatttggggatgggggctgccttttgtagttttactgacatataacattagtaaaagaaatctctggctcacaggatggctttgcaggtaaaggtccttgctaccaagcctgatcggagttctgtccctggaacccacattgtggaaggagaaaaccaactctcataagttgtcctctgacttatacgttctccctctccctcgccctctcacacacacagctaaataataatgtaaaattattaaaaaacagaaatttgtgttagttctcacctacactgaggtgaggtgatggcaagttccattatatagaaagttccaggccaacctgctctacataaggagccctaaagcaatacaaaaaaataaaacaaaacaaaacaaaaaacaaacaaaaagcagtcttgttataggcagctcaaaggaatgtctttctttctttctttttcattaatactagtggtgtgttcctggctacaaaaatgatagagtaagtgttcaaaaagatggattgataacccctactcccaaacaaaaaccaaaaatcttgtttgaataatatattggacttaatcagaaaatcccagctatgtcagaaatgactcactgaaaatatgtttaaatagtacgtatgaaactcaggcattcctttgttgataacaataacagaaacatcccatatacactctaaagtcatttgaattatcttgtggtaagacaaattaggtctctcatttaagatatagctcacctagttataaaatcagtattgctataccagagcttgcaagcaagcattttatttgcatgtttcgtgaaatagggctttagaaaaaaaaaaaaaaaaagatagacccattgatactttccatgtaggattttccagttgaaaaaaaattgaaaatgggttaacaggaagagtatatttcaggctaacatgtcattaatggtggcccccagtgagtgtggaaatgaactatgagttcattctccctaagcatatcaggcaatggctgtttgctttataatggtacattgaagaagttagttgctagggcagaaggaggtggcagtgactgctaggaccggcatgtaaagatggactcctggtagccagtttgttccaagtgtgcaggtttttgtggagaacctgtaaactttggtatctggctctgactacagaatggcatgtgcgtgtgtatgtgtgtatttgtgtgtgtgtgtgttgcttacttcatatattcctaacaaattgtgtgttcatagatttatttttgtttaaggctaatattttctttttgcagagtaggataaaatgctaggcaaattctgtataactaagttataccccgagccacagattattaatatattaaaaacatttcttaatatcttacttatgtgtatgtttgtatgttccatagaatgtgtgtggaggttagaggacaactttgtggagtcttttctctctggaattcaatccctgggttgtgctgttcattttggcagagctttctagatataagaaataggtgttttaaaaatattaactttgtgctgtgcattgttggtgtacagctttaatcccagcactcgggaggtagaggcaggtggatctatgagtttgaggccagcctggtctacagagtgagttccagaagagccaagggtgcacaaagaaaaaaataaaagccaaaaaaaaccaaaaaccaaaaacactttactagtgtttggtgtatatacatatttgtgtatgtgtgtgtgtgtgtgtgtgtgtgtgtgtgtgtgtgtggtataggcccagaggtaaacattatagtcttgctctcttattcattctttttttttttttaaaaaaaaaaactagtttacttaaatttattttatgtgcattggtgtgaaggcgttagatctcctggaactggagttacagacagttgtgagctgccatgtgggtgctgggaattgaacccaggtcctctggaagaacaaccagtgctcttaaccgctgagccatctctccagccccctcttattcattttttttttgggggggggagatgtttcgagacagagtttctctgtataaccctaggtatcctggaactcactctgtagtccaagcttggccttgaactcatgtaggtctgccatgctggattgttctctgattccttaagataaggtctcttactgtatctggagctcagtccagttttggagtcacagacactagctgtagctcatggctttcacagggtaccagggatctagctgtagctcctggctttcacaagggtactgggcatctagctgtatctcctggctttcacaagggtcctggggatctgaactaaagtccttatgctttattgacctggccatctcccctgatcccacattgttatttgacctaataactcaaaagaaaacgctcttgtacacagtgatttttttaaagaaagtatgtatagacagacattctttaggcattatcattgtgctgattagtgacacttactagttgtacagtaggaaagtaacaaacctatagtgttagcttcataggataccaggtaatgtggaaatgattatgaacatataaactgtttactgtagattaaaaattccaaaactgtgtgatatagaagtggtgaatgtgtcagtaaatatgcaaataggtaaccaagaactagaaagcaaaaaggaagttaaaaataatgttgtcctgggtgatgattgtggacaaatggcttacaacaataaagatggagcagaagtatctgaagctatacagaaatatctccagaaatcttatcctccaaggtgctaagcactgttctggctgatttggagagtgtgtgaagggatgtatctaacttctgcttgctccagctaacactgttgacatgcactctagctctagttggtgcaaattcacagtccatgatttgttcatcattgtgtcttctcaaagccatgttcccctcaagtccagtttgcattggactttgatcttaacactgtgggcttggcttgcttgcttctgccccggactccctgagtgctgggattataggcagatctggccaccctgtggggccaagctttatgctatactttaaatttatttctttacatttatttattcttgcatgtgtgttggtgcatgccatggtgcaggtatagagatcaaagaaccaacgtgtggaagtctttccaccgcgtgacttttgagggatcagattcggatcaccagtggactttacccactgagacatttcattggactcctgttactctttactcacttctagtagtgacttttacagctgggaaaattggaattaatattgtatttagaaaatatgagcaatgtgaggcgggacgagctagacttgaccttctttgtatgccaaactagcagagtgagacctttcctgaggagctgtgagtgaataactcttcactccagataaagcaccaaagaaatgattccatataagtccggcttagtcaatcagtgagtttattggggtgacttacagaagtgggagtgactcaagggcagccacgtcaccagatggtccatctgagtatgagtaaggacctgaaagctgtgcccccaattcccaggctgctcgacaggagtcctcctcatcccagcagtgaccctgtgagtctactcaggtctctgagcttcagagcttgagtggccatcttccctggtgtccaggaggaaatgtttgaatgcacagaaagtagctgctgatcatgattaatgctgattgtctggagggtttttgccaaatcatatcaaggttatcactcatcaaaactgctgcatcccactcgccagactgtagtaggtaatttcattgtgggtgaggtactgtcatgatgtagctttctgttttaatttggctggcagagccgggttgaagcatgctcacatgtgttttatggcttagccacgccctagcctctgattattttagaattctttatgtgcaaggtactgagcctccagctcactattttctttccttttttctttttatattttctttctttttattttatgtgtattagtgtttgcctgattgtatagctttgcctgcagtacccatgaagagcctaagagcacattggctcccctgggactagagttggctcccctgggactagagtcacagatggttgtgagctgcggtatgggtgctgggagttaaactctggaagagttaccccagagatatcattagtaaggagggtacagctatccatgaagataaaaccttgttttgtgatcatttaaaaaaaaatctggagcaggacacaaggctatacacttggaatatcagcatttgggtggctgaggcagaagaaatgagagttcaggattagcatagaccacatgatgagttctaggacagcctagctacagtgaatccctttaatagataaaacagtcttggatgtggggccttggtcagctacgatataaacatctgggaaagtagatttgcacacacacatgcccctcccctcaggaatgggaggaggccattcactaacattttttggctctgagtggcaaaagttcccatggttgggactcttctggtcctgtggcgtttggaagcttggtccagtataaggctgaggtttgcatcagagtttattactattataggctactgtgctcctcttgctgtatctgtggtacggatggatggatatacaggtgccttgtcagggaactggacaggatgtggaaatgaggaagagtgaattataaacatgaaaaataataaaactaagcagtaatacttaaagcaatgtcagggttttgagccttcgtaacctggcacaatggtagcataattaatagaaatgggaacttataaagagaaatgagttttaaaagagaatacatacatttgaggtcacatgagttgtattgaggtgaagttgaacacttctgagtaataacatgtgatgttaaatttatcaggaatattatatctgtcagagttcatctttaactctttgaagcctttctttttctaccgtcctcacgtaattactttgttaaaattgtttttccaaactcaggtcaattgctacctccgattgtctttgctgattgcttcagagggtccctctcaacttctgagtttaatattttatttctttctatatggcagttaatatatgataagcctgttttcttttacacatctgcatgtatatgtatactttgatttttgagacatgtttgagagcagaaaagacgacagaaggtggaaagtgtgtgtgtgtgtgtgtgtgtgtgtgtgtgtgtgtgtgtgtgtgtgtgtgtgtgtggttcaacggggaaaggggaagggagagcaggggatttcccaaatgcatgtatgaacattgtggaaaactgtaagctaattttaaaaatcaaaatatctttaaagttgtaaaatagccggccattgttggcgcacgcctttaatcccagcactcgggaggcagaggcaggcggatctctgtgagtttgaggccagcctggtctccagagagagtgccaggataggctccaaagctacacagagaaaccctgtctcgaaaaaccaaaaaaacaaaaaaaaaaaaaaaaagttgtaaaataaagtacagtacaactactttagaaagtaaaatgtgtggaagtgccatgtgtatttctttttctaactcttcggttcagtgttgcatttattgactggtacttctggttttttaattctttatatattttagatattaaatcccccacccccatctaaagtataacatatagattttctcccgttctgtaggctgtcttgtccatttattccattgattcattgatccagtttgacttcatctttgactaaacagcatctgtatttatcatgtaggacaagaaccaggtgactatatgagctagctggctctcttcgggataaggcaatgtctgtacatatgtcttccgatttctgtgtcatgcctcttctagtttgtcatcttgtgggtatggaaagtgttcccttcctcctcccctcccctcagcccctattctgtatttgttgaagacagttacttttgttttgtgacagggtcttttgtagcccaggctggccttgaactcactatgtagctaagaatggtgttgagcacctgatcctcctgcttcccaatctcaaatgctagatcataggccattttcatcacacctgtgccattcattaatctatgcacttttgtgttgttttcattagacatttgcttctttctggcatagacagaacaattaggtgactcttggagtcaatcctggcctccttcacttggctggctgtttcatttatgcctgtcacttccctcattctattatatgggacttatctcagtctttgacacagtgttgacttttctctgtgtgaaggtcctttgcttgggacttgccttcttcctcccttctttgtttctatttctgcggtgttctatgtagcctgggttggtcttgaactcatgatcctccaacctcagccagagggtgcctggattacaagagtactccaccaggcctactgcctgtcattgctgatcatatctttacctactatggtggttaagtgtcaggacctctcccccagcctggaaatcttactgattggctactgattccccagcaagctttggggaatctaccattcccagctcccaacaggtctaaggtcattgtgccaggcttctgtgtggctgctggggatccaaattcaggtcctcatgcttgcaccacaggcattttaccaactgagctaccccgtcccctcccccaccccagcccctttgatcttttgcttgagctcttggtaggtaattttagtagaggcacatgatagagaagatcctttactagttcaacctgggaagcttctagaattgtaacacgggattgtgtagtacactttatccttctctggaagaagagatcctttatttatggacagacctcttgaagagttgctgattttttttttaaactccaaagccaaaatatattgggccaggtgctgtggtggcacaggcatgtgatcccagcatgtaagaggcagatgcagaagggttgctgcaagactaaggttagcctggtctgtatagtcatttcaagggtagccagggataaggaacaagaccttgtctcaaaaagctaaaaatcaaaacaaagcaagaaaacaaaacaaacaaagaaacaaacaaaaaacaggctggagacagctcagctattaagagcactggctgctcatgtagaagacttagggccagttcttaccatcctcgtggtagctcacaaccatctgtaattgcagttccagggaatctgacatcctcttctggcctctgaaggcaccaggcaccaggcatgcacacagtgcacatccatatatgcaggcaaaacatccatatgcattaaataaaaataaatcttttttaaaaagccagaaaaccaaagaaattatttaaaatgtttaaattatattatttatttattttgctatatgtgcataagtgtgtgtgtgtgcacgtggaggtcagagaataacttttgatagatagttctcacctgcaatgatgtgggtaccccaggatcaaactcaggtcctcagatttgaccacatgtgacattattggataagctatcccattgagcttcccctccactcccgaaaaaatacttttttaaacacaacacaccatatcaccacaaaaaacacagtttttgttttgtttttctttaaagaagttacattggctacctttgtgccactgtggccaatttcactttagaaagatttgttttgaagggtccagcccttggtctttggctgctggtgcttgggtgagacaaggtggtgatgggagcatttggaggagagtcttcattgagggaaggaagcaaagaaagagcaacggcagcactccttaagcaaacatggttccactggcaacaagctacactcaggagaacgctaaactgatagcattgtagtctgcctctaatctggttactaccctggctccctgcctccttttctctggaccgcactcgcaggatttcctaacattcactttttgttagtaatcaggtgtacagtggtcacatgtaatggcccaaggcctcttcaccttagatactcatctttggtggagtgaaaacaatgtgacaggaaaaacttctgccacaggtgaatggcttttgactggagatgggagagtctttcttctagctggaggaatggtggagagcagcttaatcctggtgtgtgtggggggggtgtcacggaaaggctgcctttccttgggggttgggaacctggtagagaacagtgtggaagagtttgtatgcacctgctattcagtctgaagccattaaaggtaccttggcaaaatgaaagcagccaccaaatgctgaagactcaaccaggttttccaggtacagcattttagtggctgatcttggttgtcaacttaacacctgggaagagggaacctcaatcaaccaattgcctccatcagattggcctgtgggtatgtctatggggcatttgcttgattgctaattgaggtaggtgggcccacagtcccttgtgggtggaacctttcctaggctagtgagtctgtgcaagctgggctgtataaaaaaggtagctgaatgagtctcagagagcaagccagaaagcagcgttcttgtttgatctcagcttcagttcctgcctgggcatccatccctccatgatggactgtaacatataagccaaataaccctttcctccctcaagttgtctttgtttagtgttttattccagcaacagaaaacagcggtgaagagtagaaattgactggccaccaactgaacctgatagcttccccaccctccacccctaagttcacattctctaaaaagagcagcgtgtgttgtgtacatgcatgcatgtgtgcgtgtgtgcgtgcgcgcccgatgatgtgaagcatttcctatagctcacttattaggataatgtcttttgtggtcttagccatgtaccatcaccaccttttattatgatgcttctgataacgtgctttaagctagaaggctaaagataaaattgaacttgccctaaccgcccctccctgccccccgcccctccattgggaaaaacaactcattttcaaattcagtttctccttattctcacaacatacacatttctgacctatgtgagattcttttaaaagaaatattattttacataccaatcccaggtccctcttccttctgtcctccctcttccccccaccttctcccaccccacccccatccactcctcagagagggtgaatcctcctatggggaaccaacaaagtctttcacgtcccgtgtgaggttctttaccacaaataaagcatgtaagcagtcagttctgtagtagtgcatgtctctgaggtgtttgaatccacttcagttttgatactgtctagccggacatccgtggcgctcagggcttaaccataagactcctccctgcagatgttagtgccagccccaggtgacttcacctatggttctggcccacagctgtaaatcagggctcccacaatcctttctgcagagttgatgaatgaatggacttgagtcattcacaaaacttaaggaaacaggtggaagctatggcacccatgtggaacatgccatcctccgagaaactccatgtgttcatctttctggaagttctttcagactcctttgaggtctttgtggaaattttacttgcatgcccatgatgaaagcatgggcccagtgttgaagtgtgattaaaaaagtatgatctaatactaatagactgggtgggacccccattgaagcttgtctgttcagattagccttcttttctcctgagtgtggacaagaccccatctgagatgaggactttatctcctagcagacaaggtaggtcagaaaaaggcagggaagatggctttgaggaaggggtgttctggtgcctgtggcctgttgctctggtttctacagattgacaattcctattcagggcctggaagtctgaatgagaatgccctgcaggagttcagctggagacggtttattccccattattctgtcaaggagtgtaatgggagctgactgctcacccagatgaagacacgggaggccttatagaagcactcagcaaaggattgctaagcaatttaggtctctttgttcagtggagcccttcattttaaacttttctttcacttttcacttggtttttgagcctgggtgtcttgtagccgaagctgtccttgaacttgctatgcagtcaagaatggccttggaactcttcattcctcttgcttctgaatgctgaggtggtaggcgtgtgccaccaggtctgggtctctatgtatgattttctataactaaatcatgattctaattttttgccagttttctgaaaacctagcttaagagaagggggatatgtgggttggagaagagggtgaatgagaggccaacagtaaatgaggcaaggtggtttttgttttgcttttctttttaaataggaattggtgctttctcctaagcacggataatgttgcttctagttctcattgatttttagtgtccacagacattccaaatgttagatgtttcctttacattgagaatgtttttcatttttttgttattgttgttacctaaattttattttgtgtggtgtgtgtgtataagtcaagggataacctgtggaattcggttctctagttctaccatgtgagtccttggggtgccaggcttggtagagagtgcccttacctgctgaacagtcttgctggtctgagaacacgcacactttctctctctctctctctctctctctctctctctctctctctctctctctctctctccagcttgtatgttggcatatttggaatgcagagactttgctacttacaatcaactactgtgaaatactagaaaatttctctgttgtttttccataagcttacaggttgtaatgcctccttgctcagactgtcaaaatggactgtcagtagtccattccccaaatgctctacggtttataaaagacaaaaggaagtgcaattcatcccatacacagaaggtctgaatatgatggagcattgccctttggagatgagagacagtgaaccccagagataaggatttatccagtcttcctctcatatagaaactttcttccctatgaggaggcagagttaaatttgggtgtagttcttgctggcaaatatttatgaatgccttctatattccaggaactgtgctagattctaacaagaggctgtgaaatgagatgtgatgtgctttcagggagctaagttaacaaacacagaaagttcacactcctatcaagaaccgacaatgtaatccttgttggtccacccgtttgctacagtatatttgtaaccctccaagcagtattccacagtatgactacaacaaatagagtcccctccccctacagagtgagactgatgtatacttgataggtttgtcatctcctggctcaattttcagttcccttgtcatatgattttcgttattatggcatgtaggcctggtgaatgtacaacttatggtccagcaaatagaggtaacgattcctctcagttctgtttgtgtaggagttgggggaggcaggcagcttcctcccaactgtcgctgataatttggaccctgcatttcagcatttcaccaggaattgggcctccttcttttcctcactggtctcagtgatggaagctggaagtggaacaggggcagatcacttgccatcattgtgatttcggatctgtgctgcccagctgggtataatggctacatacggctgttggtacttcttaaattgtctagtgtgaatggagatgtcttctaagccatccaggaagggtgacatgctgtaatccctggactccagagagtgaagagaaggattgttgaagccaacctggtctaaaaactaatcaatttcatatgtagtccttggtccttgttcttgaacttccttacctagcttagggattcagaaaggacactgtgccgtgtgatgagatgtgaaaggagacccatacttcatagcgtcagccatagcactaatgtccctgggaagcagacatccacggtttactgtcagtggacactgcttccacacatgcctttatgcagttgtgcacagcccgaatgtttgtgcctaaattatgccccagggcagtgtggagttgagacagttcttctaaggtacacccacggggaagagctgaagcctggttgtagctaggcagttctaaactctaagaagcaaatccttctaagtcctgtctgtcttagtgccgtggctgtctaagcatttttcagaacagggcattatgggaaattcttaccaaatggataactttgctttgttgttgagtgagcttacaaggtctagcttggaaagttacatggaaggtgttttagaaagaggatttgatgtgatttggggtgctgtgattaggggtataagaggtttaaaggggcctttgtcagtgggagagatgattaacttgtatatttcatagttagaattttctaacttgtatcgatttgttcttcagtttactcttctatgtggactttgcagagtctattttagattgtgtaatttcttggagattccagagaactggctgcaatttgagaggttgggattgaagtgaggaggtgactggttttagtaaagtcacctgccagatgttgttgtggctagttgtttctctcagctttgtgctgtgtgagtgactcccatgctgtcgtctctgagctgtcatcatataaaacagtaagtactctgggcctcatgcacacagacaaacagaacaccccatctgtctagagcaccacaggttttccaaggggttcccagctgctcacatttaacgtttccaaagcccttaggaatgcaatggtagagtcagcagctgaggagactgagcctcagaatgtttgagtagctgtcctgagtcacatggacagtgagtaactgggccagaatgaggtgtagcttgccttccagcccaacattctgttcctggtgtgaccagcagggccccagctgacggtgatccccttgcctgctcagatgtctcctgagttcctggtactcaggcttaccatgaggcacttactcagagatgtgtctgctgattcacagtttaacatccttttccttgctttctcttctcataaactgatttctgcatattcttaagcagcagatgtagctctttgttttttctctccccccccctttggctattagaacttaaagaacattcttaattagtgatacatttgttacatgggaggctttttagctctattatgatataaatcatggctgttacccatcaatctaaaatgggagaggacaggagagagttgtcatttaaccaatatttgtttagtcttgagataagatcttatgtagccaacctggactacatagtgagtctctatatcaaaacttaatgtgtattagttagacattatggcatatacttgggaggtagaaggcaggaggatcaggaattcaggtcatccttggctatatagcaagttcaaggccagtttgggatatatgagactttgtctcaaaaaagccaaaagaaaaacaagaagtaaaccaaacaccctccaaatccggctgtagagctctggcctaacatcagcaaggcccagagtgctatcctttgccccaaagttttaaatgtaagagggatcttttcacaaaaagtctgttgtctagggggacttgggaaccagtttaatgtgggacaggtgtgtgtagcacaaggcagatgagggagtgcagagggttgtgaaaaaaataaggcttgtcactgagggtctccctgatggtccagcatggctataactcagctgtggttagagcatgtgaattgatggtagtcagtactttgtcttatgaccctggccatatatagagctctgcagtgcgtgctcagtaataagctgcatgttgcaaagtattggtggagaagttagttgtgttacagctttacatcaaagtaaaagtgaagtgggggctctgtagcattctctgtaagttgcatttccaaacacatggcaagattctgataagaataatcctagtgctaaccatggcgtcacgtacctgtactctcagtacttgggaggtggctgcataagggtcagaaattcagagtcatccttggctaaatagaacatttgaggccagcctggactatatttctacaaatgctctccagagtgtgtgtacttgtaactgtgtgccctgctcacgtgattttcaggaaatgagagacctgtaaatgcttccggacataatgacctcaacccaacaacagctcagcttccagcgttctaaacagcactggactattggtgccttcaaatgctggtagcaacatgcacacatcagagttaaactttaaaagttctgtaatgtttgttgctaatgttttctcatgctctataatctttatatatataatttatgtgtgtgttttattcaaatgtatgactgtgcaccatgtgtgtgtctggtgcctttggaagtcagaacgagggcattgaatcccctgaaacaggtgttgagcctccatgtgggtcctctgcaagaacagggctcttaagcaccgagctgtctctttagtcacctaactattattttatttaatgatcttaaaataagtatggctgttgttaattttacccacatggaggaaaatcatacgtaaggaagaaagagtgtagtttgaagtctctgatactggaccttaaaggaaaaaacaaaataaaaaacaaagcaaagaaaaaaccaaagcaaacaaaaatcccacgaaagtccatcataatgcttgcatagagggctagttattgttctcagatagtgccttttgggtacagtgacactgcactcttgggacagcctctgaaccaccctaccctcacttggcgtctttgttatggaaaaggatgagaataaaaatagttaacaagcacaactttctgaccactcttatcagggctactgtttcctgtattcctgcagcctctcacctccctcatttctatgtcatcagcaggcaggtcctttgcagataaccctcaaatagctttttctgttctgtttttttttttgtttgtttgtttgttttgttttttaagtaatgtgaatggtttagaactttcccaagatagtgagatggctcagagggtaaaggtactagtttgatccctggaacccagatggtggaaggagagaaccagctcttgcaagttgtcctctgaccttcacacatgcacacaatattactcccccacacctgcagccatacagtaaataattttaactacacagttctcccccatgtgtgttatattgttgcttagtattgaagtcttcaaatgaaaagaatcctggagtttggttttagctgcatctctacactgttgctgactttaatgaatatttatggtagcagttatggtgaagaaaaaaaaaacagtgtatgtggtgatatattgtttatgatttattaaagcttacctgagccacaagccttaaaagccaggtacacacctttaatccccgtggccagaagcgaggaggtggtggtatacacctttaatcctagggctcaggattaagagatagatggatctctgagtccaaggccacccagatctacacaagagtgcatcagtctaaatgagaattatagctcacaactttaatcccaacattagggaagtgtataagtcaggaacaatgtctcagtaagagggattcattctccagccacactgaagatagggacattcattctccagcctcactgaggagaggcagcagtttgagatttggtgaagaattcatacatggatcagcgcttacagcctgagctagaggtgagagttagtggccagctgctttgcttttctggtattaaagtttgaacccggtatcagtctctggaccatttattttttcgtgttacatgagtacacagtgcccttgacagggtaagtgctttttaaatgtttacttatggtttgtcttctcagctgtctgtgggattgattggctttggtaaaacctatagaatcaagaaatcaagggatcatttctggcaaaaaaaattagtttcaaagtcactttatctatttgtaaataataaatacatattactgcagaaatagagaataagtaaggaagaaaaagaaaagtagcatcagtctggctccttcaagacattctaatatttacttctactttagtaagaacacatgaagtatcaaagtgtgcatacagctttgagtcttgctctttttaaatgttgtagtagaagagactttctgtgtcctggctttctgtgaagacacactggtcttttagtcactgagtgcctttgatggctgcatttcagagtatggcaatgaaggtagaaagtaacctagattctagtgaggaacaatagagcatctgttctgtttgcttttcaagacagggtcattgtaggtagttgtgtagcccaggctgtccttgaattcactgtatagcccaaactggctttgagctcattatgtagctcagtctggacttgaacttacagtcttccttccttagccctcaggatgctagaattccagacacagaccatcaagtgcagcttcaggaaccatagatcatcatgaattttcatgaaacttaaaaaaaaataattgtgacagggaacggccccggagcttgatagtgctaagcatgagtttagtatcgatatgcttaaaagtagagaaaaaaacctaagtatgcctatttgaatgaagtcaaagcaataaacccagttgattttagtgcacatttaaactaactctgtttgggatagggtggagagagaaagtaggagggagagaaggaggagagagaatatgaataagaatatccttgctggagtgcacctcagccacctccagaataccaagctgggcatgtcgagtggcagcacagcaggcattccgtggtctgcttggctcctgcacagggaatgtttacatgtgagcagggcagggttcatggcaaggtgtctggcaagagacttagtcacccacagagcatatgacttgtcctcagtgctaaattagaatctaaacattccaagtggcaaagggttctggatggtagaaaaggaatttgactcagtgcagtgatacccagtggtatgtacagatggtcacatccagacgggtaccccttgacagaacagtgcaagggtactcatgtgtgagcctaatgctcactcaggagcaagggtgcctgtgtttaagtcatggctcagtatgacaagctttgcttagagtccctccctcatccatttcttccctgtgcttccctcccttccttccatacctttctctgtttccttttgtcccctcccagtttctgaccctttctttccccttccctgtctactccctttctgtcttttcatggtgctggaaacttcctggtgcagattctaagcaggtgggctcgccctagttccaagttacatactccatactcagtgcatttttaaattttgaagcaggatctcagtaagttgcctaggttagccttgaactcgctatatagaacaggcaggccttaaacttgtcatcctcctgccttagtctcttgggtagctgtgactgtaggtgtgtatgagcatgttcagctattctttcacttttctgtgcttggttctccctacctgttaaaagatgacgttactaccaccacttcctgtgattaagagaaacccagagagcaattcctggcatgcaaaataagcactcagtgaatctagctagccattatctgtatagtacaactgagtttgtatatattgccaagtttcctgactgtcatgcttgtctgacgaattgagatggtatcgggtatgttgtggcacagacaggcagggtattattttttattattattactgttattatatactgtgctggtgttgtgtggatgggctgctgtcaggttgttagactctaccgactgcctctgatcacattcctgtccagcttagttccaatcctggatctgtctctgaagcctttttcttaaagcacactgtaacaaaagttcttacactccctaccttagttcagttactgtgatctaccacatcagtttgcttgtgctccctctctgcccctcttcctctctccttttcttcctccctctgtctctgtctctctctcctcttctccctcttctctttttctctctcttttccctccctccttctctttctttaacagggtctcttgtagcccctgttgccttcaaacttgattatgtaactgagaaagaccttgaacttttgccccctccccccattctgctgggattacaggcctggtctgtgagtgttgcgttttgtttctttttcttgacacagagtctgatgaaactctgagtctaatgaaactagatacttgctagcttcataatacttgctatgtagccaaggatgaccttgaactgtgtgtgtctgtacacacacatgcattgggaggccagaggtcaactacagatgtctttctcagtcactttctaccttattttgtgaagtaggtgtctgccactgaacatagtttacttactcacccagactggctggccagcaaggcccaggggtcgtcctgtctctgtttgttcagtgctgaggttacaggcacacctgcagtgcctggcctttatgagggcgctaagaatggatgagttcaggtactcatgctcagcaagcacttactgactgagccatctctacagcccatgaccttgactttgtcatcctcttgccactcactgtggctcaagtgttggaattgcagatgtgtgccacctcacctggcactcctttttaaagtctcaatacacttcgttctgaattataatatattgaaaactacatatgtcacttgctcagtgctcacatctccaggaaagagtacctttttatactttggtgtctgctgttgggccccatattttgaaaactcacagctgtgctatcagctgctctgggggtggaaaaggtgtcatagaagagagggagtgatacagtgaagggttggttgtaacactgtgtcctgtggttttgtttgtttcttaggaagataatgtgaattagcaaaggattgcttaaatagaataactagatgccaatacattgcaggggctgagccaggttttagttttttccttctcttttctaagccatttatttacttatttatttttggtttctcaagacaatgtttctttgtggctttggaggctgtactggaactagttcttatagaccaggctagtctcgaactcgcagagattctcctgcctctgcctcttgaatgctgggatcaaaggcgtgcacccccaccgtccggctctaagccatttcttaattgtgacttttgagttgagttttcatgatgttctgtgagcactggttcacgggaaaaagtgtaagtttaagagatacaaaaaaaaaaaaaaatgccccagtacttaacttgcaactttcctgcctttgactctcctacccctgcatctggcaaagaaactctccttcctctgctgtgcagtcttggggtggaggtggtcctggagcactgtactgagtggtttggagaggagtctgcataataagaagcagtgtttcgagtgatcagaggttcttgccacaggcagtactgagcaggcacattaagtacattcgctatctaagtggtagcaattttcattgctgatctgtaggaccatttcaatgcctggaatttgtgaatggaaacagtacaccagtagtttaatcaactgaggctgggaccgtgttcaggggtagagtgcattatctagcctggtttcaaccccatgaccaaacacttgaacctgtagtccattcctttaaatgcttcattgaacctctgtcctgactcctgatatctcctcaagttctctgtgctatggtagagccagtggtggcagcagaggctctaggtaggttactgagctgcagctgggttgtgggtctgttcagtgactgcagatgatttcctgaagaggagctttagctgactctttgttttttataatgtgtggatgagctttgggaggaaagtagagatgactaccatgaggactacagatagagttggtgataattgtaatatgtgtgtttgtagtatttcagagtagggtaccagcatggtcatgcaccacaatgtgagtacctgtgtaagcggatgactctgtttcaggagagagaagattttaagaacagcagtatagggcccagaagatttttctttcatctgtctaccctgtcagcgctctcatgtctcagaaaaacacttgtggtgatatagttgtttttcatttactgcaggaatttgaaagctcttatttaaatgtaaagcagtttagaatagaaaagaggcttccaatttaagtgtgatagtgtggttttgtattttaatcatactttatcagattttggactgtagaattaaaggttaaggaacataataacagaggaaatgtcactttcacatttttgcaagtttcgatgtcctttctcatacatgatgtgagtcacattgattggagtgatcacaaggtctcgaagcctctgtgggaacttggctgcagtagggggaggatgtacattataacctagaagcccccaactcacaggactgtacatcagactaccacagatgtatactgtttgctgcaggtaaatttgtgtcagagcttcagtgcaaatgtggagcgcttattaaacccatcagtagcatctgctgggcacctaccagatgtaaaatctctctgtggttcagagaataacaagacctagtttttatatgctaccagtttacaatctatttagcactctaaaacgtgtgttatatgaaaatgagcgagcagtaggcattaaaagtgtactgaaagttataaagagctcagagaacaaaagcgattcccatagggacggtacagtttctgtttaaggaagtgattctcaggtgtggggttccttccttgtgtcagtttctgtttaagtgaatcccatcaaaatgcagtcagatccttatttcattcacatgtcatttgtgagcatacctattttagatgttattcttattttaaattattatatatactactatgtaaggggtaaaatatgtgcatttatcacatcatttgtaattactttgaaaatgccaccttgtggctgaactactgagttaagtgtataatgttgggaagaatttgatgacagaattgggggtatagctctggagaagacttgctcagcctggataaagtgctggattctatcttaatactcctccccttattaaaaaaaaaaaaaaagcatttatgatctttccttagatcctaggtaaatatctcatagagattgaagtaagtgtgtgtgtgtgtgtgtgtgtgtgtgtgtgtgtgtgtgtgtgtgtgtagccctggctgtcctgaagcgcattctgtagaccaggctggccacgaactcagagatccacctgcctctgcctccttagtgctgggattaaaggtgtgcaccacaaacatcagctgtgaggttgaagttttaaggatttttattttttatttttttaagacagggtctcatgattcttaggctggtctcagaatgcctctactcttccaagtgctgagatttgatgtggtttacccttccagattgtgaggtgctggagagtgaatgtcaggactcaggcctgctagacagatattctaccagatcacacctcccactcctccactaccccccacccccagcaaaatctttatttttaagatttatttattatgtatacagtgttctgaccagaagagggtaccagatctccttctagatggttgtgagtcaccaggtggttactgggaattggactcaggacctctggaagagcagccagtgctcttaacctttaagccatctctctagccccagcccctctaagatcttttatacaaaaaaagtgaactgcatccccctagcacttctgctttgtagaaaagcattttcctatcagtcttgcatctgttttttcatttccccagtaagtttagtctaaatattgcatgactgagagatacttagtacttagtaggtcatttgtgttcctagtctgctctgtcccttgaactggaactatcttaatactatttggatactctctgttggaagagaatgttgttttagatagttcaaagggaaaaagaaccgtaaccagagtggagcctggagtaaagctttaggctggttcttggagaaccaaattcattttctcctcatctgggcctgtcttgataccatcaatttagcaattgccacagagaagacaattgttgtcatggaggtcataatcttgattatctggggactctttctttagttcattttaggagggtgtcctgtctcatgcacagcatgtaaatcgtcttaaggcaactgagaccagtgcctggcatttgttttctgactttagtgaactgtgactgtctggataaagacacatttaagaccaagaccacagagccaaccaaggctgccccagacctgagggatggacccagcagtattctcttaagccaaatttcaggaaaagggagttagtgtcacctatagagttgtattgttttctagacttgacctgtgttttggggacctgtggtttttattctagaaggaaaagattttctccgtggaccacagactccagtttacctcataacattctcatatccagaatagccatgttgatgtccgaagctagaattggtaattggggctttctcagcttgagtgtgcccaggaattcaatgcaagagctgggaggccttttcttattagtggtctctcattatcattacccccacccccaaccccctcacacgatggtaagaatatgccctgctctgcatctcatcccattcatgtctccttccacatagtaagttctgcattttggatcttgtgggcacccatccctcactggctatggctgatttcgcaaggttgtggagtagggattgtcagctgacacttactcacatgagaaccattaagagagtggtgtggccaatgtcagagcaaccttgcagcccaaggattgcccagagccacatgagctggtctcatgactgtagagggagggctgtataaactctgctcgggatgcagatggcgtgagtcagtgcaagctgctggacctgttgtgagcgctagagtacaggcttaggaaaagtagggagagatttgtgcttgtctactttattataggtttactgagagcatgttttataatgtaatggatacatctgtttccagaagtcattctgggcttacattgacataatgaatgaaccttttttttttttttaaaaaaaaaaaagcttctaaaagaggaagttaggagtagcttgtctcacgtgctatgcagggaatgaaatgatctttacactggagcttttgctagtcactgtggaatatccctcagatagcgaaggaacatcaagagtggtctaggccacactgatggtcgggatcaactgaagagtgtctgtacctctcaggagatgtgtggtggtacagcaaaagctacaaactggccagcgggccaacaggagtcagccagatgtgtgactgatgccacttctggtgctgggagaattttcaagtcactcatatgtgcgaagattccaaaatgtgccagaggaggaaggggcacaaatcccgaaatgctcaaccacaggtttgaaagtttcgttctgttttagtctgggaaatactaacttcaactggactctaagatgtttcattggtttgaattgtgttttcaagaatgctgcatgtagcagaaatgtggttggtggtggtttgtagaaacaagtcctttcctcagaaaagatgtgggtgcagatattctcctggtggttaggactctgttaccatcttataagtttttgttacctctgctgaagccaacttgtaagaaatgcttgtggccttgtctggacccctgagtgtactgcttgcactcagagttaaagccctgagtaccagagcacacagaggacagagcaaggactggagttctgcttggtggtcggccaggtatgtgtgtgctgaggcagggcgctgagggagaacctggttttactctgactaatgcctttcatgagaaggatgtgtcatgaccaactaactttagtagtgagtttataaggaacacagttggtcctgctctacttatatcctttctggttacttcatctacctttatttacttactttatttatatgtatgtgtgtcttgcctgcctgtgtgtctgtgcaccacttacatgcatggtgcccacggaggccagacaaggacatcagatcctctggaaccagacttacagatgattgtgagccaccatgtaggtgctgggaattaaacctgggtgctttggaagggcaaccagtgctcttaaccactgagccatctctccaacccctttactgactttggaagaagtaatttctctagcagtgtaacttaattgaaacactttgtaagattttactatgtatcaaaaaagacaaaaggaagaaaagcactgggtacaaactttgaaaattgcatttcatcccagactcttacattgacagccaaaggtgaagctccaattcttgtgagtaatgtataaaagtaagtttctaaagtttgacttaggaattttaattggaaagttcttggggtggagtgatggctcagcagttgatagtactggctgctctttcacaggaactgggtttgttcccccacatccacaggatggctcacaactgtctctttcctccagttccagaggacccaccgtcctcttctgcactcttcaggccgctctatgaacactgtgcacgtacgttcacccaggcccacataaaataaaacaattaaaaaaaatctttacaaagaataaaatttctccaaatcatcaggtttcacaaactgtttatcccacataaactgttacacttactggtttaagctaaaagtaatcgatacatgtttgagacaggtcttggctgtatgtccctggctaggtgaaactggatgttccaccacacccaactagaatatagtttctgtcatgcagaaatcgttgtcttagtacatcctaataaaatggtaagtggcctacaagatgcaagctcttccctggagaataggagcagcattttacaagtgtggctcacatgctgtctgctcagccagccgaaggggcccgtctgccaagcaataggtaatgaatggtgtggaccattagatgtctgtgagcatgtcactttcttgtgtgtgctcttgtatgcttcttaacaagaaagaagagttgagtgctgggggaatagtcagagctaagcctctgaagctgaagctgtcgccactggtgggactgtggctttctgagtcccactcttgctgttaagctatggggtaggctcagaacgatttaaaaactctaagctgctgcattagcatcttctgtcttttcttgtagaatcccagatccctaagttgttacttggagtgactgtccccataaaataataacttggatcatgccagttcctttaaaacttgtaaaaaaaaagaaagaaaaccaacaacaacaacaacaaaaaccacctttgtgtaagccagtgctgttcaaacttataataaattttcagttttggtatgattttattagttttcacctagatactactttaaatataatagaacactttgcaacctgttttccccctttattataacttagatttcattcccagtgctgaaaggtttgaaggtttatctttcatatttgagttctgtgtagtgatgacttttatggttcagtgtatttagaagtatctagctggattcagttgatcccaatgtttctgatatctgggggattgtcacaatcaggagccaactgaacattgtcttctgcctatccactgatctgacattggtcacatctgtgttgagctgctttttagtctgtttggttgatcctgacagccatagttagcatctgtgtgctgtcttcttggctgactcagtggtcaggggaacttaatggctcagtggccaagtttgtttcttccaggggcaatttgggaggcctctagaagacatgtgaagatgtgtgtttgaaattcattggaattcatttcaggtcagaccagtcgtttcatccactctcttccccttcctacaatcttaaaaatgtgtgtgtgggttggtaggatggctcagcagagaaaggtgtggctgtgaaccctgacaacctgagtttcttctgtagcagtcacataggtggtcggggagccggtgactcccatggattgtcctgacttccaaatgggtgccatggtgtgtatgtgtgtgcaggtgcatgacactggaggagccacactgaaaaacacatgtgttacttacagtgtggcattagtttccagacttcattttagagctctggctagcccccaagaatacttgtaaattattgacaggagcttgcacagttgggatctggccccaaactgctcactggtttctgtttgctcaagtcatgtggctgtcagagagacatccagctcccttgctctaatgcaccttcagtcagtagttccagatcttatttgagtatattgattagctgatatatttttgcctcatcatgattttccaattatatgaaacaggaaaaatccagtaagtaaaatagtcagtgtgtgtgtgtgtgtgtgtgtgtgtgtgtgtgtgtgtgtgtgtagcatcagcccagtgaccactgtgcagacaacagcccagtgcagaaaggtagaaaggtgcattttggtatatcactgtggttcacaggtagaaattgtcctttgtatcttcacttccatattcctttgtttccataatgacatacagctcatggaattacagaatcagtatcaacaaaaatctgtctcttaagcggtttgctaataaagaattctttcctaaaactccattgaaatctggtaatttgcagcatgctgggtatgtggtatagttttccaataactgtttctaatctcttttttaaaatgtagattatagcaaagcttctgctgatttttaatctttttatgttttcctgaaaactcagataaggccacagaattgttctgaggaatcttaagaatgcttgctagccatatataagaaacaggaaaagttaaccttgccttaccattggagtgaagaggaagtgagataaacacttcagagccaattgcactttgcagtttcatatctgcaagtttgagttcagaagaaattgtaccatacaggttggggctgggaggaactcaggtggactggtgctgagtgtgggccacaccctgggtccatccccagcacccaaaacagatcacactgatcagcagcatgggggcagggaggagtcagtgtatgaagaccatttccaaagggaaatccctagactgtctgaagtagcttagcaagtgtcctttagtgaaccaaatcacagggtgcaagaccagtcacagatttaaagacggaaacactaaggtggtgaactgcagaattctgaagacttatctaaaagaaagcgtacgtataggctccaggcttgggaagtgtttttcactgtgttctgcacatggaaactgtgaaaaccattctacttaataggaaatgtgtctgttggacaggttgaatgaagtgggtagagaaaacaaaacagaacacaagcaaacaaatgaaaatcccagccaaagagcgggaggctggtcgtcttgtgtttatgacaagttttacaagcttgctgggtgtgactctttaagtgttaaacatgtcacaagttctggccttcattcactccttctcttttcactgtcttatgtgcaataaggaattttcttttaccgattgataggtaatgtcagtggttgattctggcaatgtaatctgagactaagtgagtgactgaagggatgctgtggtaattttgtactccagcagttttaagagcttttcatcttttctaggacacatctattactattggagaatcagagcagtgcagatacagggggttttcacacaagcagataactgaagtacacttttgtctgggtcttactttgataagctttgatagctaggtaaaacacttgttagtcaccatatgtaatccagtcctgagtgacagtgtcccagacagaaaacggggctacttcatcactgcagtctgcaggtcagccatagtgcagctgctgaagcatttctgctcagtttcctgtgctgagcttgggtgcttgccggactgatcccaacttcctggctctcctgttctcattcctgttgtgagtcaggctctggtttagcctgtcctgttgttacattattaacaaaagctggcagagtgctgaacagtgagcagcaagctccagcgatgtcctgattctgaatgtaaaggagttccaaagccacagtcaaccacagggccaaactgagttccagtaacacaccatgtctccacactctcagagccttcctcacatggtggtgcgtttgtataatggcacattatcacccagagtctgtaatttatatttgggtccactctccatgttatatcctgttagttttgacagatgggatttatggagtaatttcagtaccctagaaatcaactttatctgtatcttccatctcctcttctaaattgaaacaatctttttcagaatgctgtttgattagaagcatacaacaggcaaccttttaagattgattctttcatttagtactatccatttaaagttaatccatgtctattcatggcttgatagctcatttctttcttctgaatcatctgttgtttccttacctaatgaacagcttggatgcttccaagtgtttgaagtttatccatgaagctgctgtaaacatctgtgggcagagtttcgcatgtgtgtttcatctcatttggttaaatagcaagaatctcagttgctgcatagtagaagggtgtgttctaaggaaatgctaggctgtcttctaaaatggctctacctctagcaattcgggagcaccaacatttggacagtctgtgttctggactttgcttactctaatagatatatagttacatttcattgttctgatttgcatttttctgggtttcccctttgttttgtttttgagacagtgttttacctgttgcccttgctgacctggaactcactgtgtagaccaggctaaccttgaacttgtggtgatcctcttgttccaagccaccctgcctggctaattggtactgttctaatgacatatgatatggactatctattctttctacctgtatccttatccatttttgaagtcatgctttctttttaaaaatgtaaagctcttttatatttattttttataagagttttgcctgcatttatgtatatgcactgtgtgcatgcctggtgtctgggaactggagttacagacggttctgggtcaccatgtgggtgctgagaactgaattcaggttctctgcaaaaacaagtactcctcctaaccactgagtaacctctccagccccatgctcttttttttctttttccttttttttttttttttttgttgttgttgttgtattttgtttttttgagtcagagtctctttatgtactctatgtagtcctggctggtctagaactcactatgcagaccaggctggcttcagattcatagatatttgcctgcttcttcctcccaaatgctgagattaaagatgtgaagcatgtctttcccatgcttgctttcttgtcaggttttcaggtctctttgttttggataacagtcctttattagatacgtgttttgcaaatgttttctttgctcagcctgagacttgtcttctcatttacttgacagtatttgatagagcagaagtttttaagttttagtaagtttgtcttaccaatgatttgttttgtggaccatgtctgtgatgttgtattaaaaactattgtccatgtcctaaaaaatctatattctttcttgttggcgtgttttgttttgttggttttttggttttttgagcaatagtctcagtctgcagcctcatcttgttccaatcttactgtatatagtcctgctgtcccgcactcggtgaccctcccactttggcttcctctatgctgggattacaggcaggagccactgcaccaggctgagctacagggttgggcatgttacatttagatttgagattcattttgacatatctctgtgaagagtgtaaggtagaggtgtgtgtgtgtgtgtgtgtgtgtgtgtgtagatatccagttttcccaaaccacttattcaaattcttttcgttcttggcagatacacttttttttcccccagtatttctttacttgtatattttttacatgtgtatgtggaagttaacgcaagtaaatttgtttgacattctaaaaatattaggcagttactttggtatggctgtacacttctcaaaataccctgcatatgtcccaatcctaaccttccagaggtttctctaggttcagatgcatgcacacacacagacacacagacacacacacacttttactgactggaaatgcttagcccattaagaagtatgtttttttgaggattggaaagatggcccagtggttaagaacactagcagctcttgcagaggacccagatttggttcccagcacctacactgggtggctcacaatctgtagctatagttctaggggatctgatacctacccacttccagcctcttgggcatctgcatacatgtggtacacatacttgcatgcactcaggcactcatacacataaaaagaaaataaataaattaatcttttttttctttttttttttaagtatgttttcaaggcatagaatacatctggaagggtaaaggatatcatgaggccatgtagattagttcagtagattgtgttccttttacagccagatagccatctatctattccagttatcccatacatattcagttaggtctttcagcaaagggagccttagacgagatgactttaagtcaccgtgttattttataggggtcgaaatgtaggactaagatgttctgatgagggctgacttcttgaccccaggtatcctggcatccagggctgtgttctacttttttctgtgcatggtagcccttgaatgtggctgatggttctgtgaatgctgcacacacatgtgacctctttccaagttaaccagatacaaccctgagctcaaaaaagacagggaaaaaaagtgtcttttttacttggcagttctttttctagtacctaaaccttaggctgcaatgacacatgctataatgttttgttgttactgtgtgaacagcttatatagggacttaggcgcttttggcttgtgacccttgctaccatttatagcattgttatggggctcagagtcacaacctccttaacatgaatcgttggctgtcatctttgataggaatcagttattcttgggaaaaatgtcgagacctggaagtttatgtatccctttggtcctaccttcaaatacagcaattaccaaacagttccacagtcctttatcctgcatttccaaaatcttaaaatctctgaaaaaatctacaaatgatctgatctgataataaagctatataaaatatttgtttttagtacatattcatcacttgggctgcaatctcatttaggagtttgcctcttactctgggggaggtattatataatatgtagtatatgcatctttctaaaatctaaaaaaaaaaaatgaattctgaaacatctggctctgggaattctgttaagggattgtgtgtctgaattgaatgtgtctgagctgtgcttcatgaggcttagtctggaactattgaagcaggagagatggcctggtgccatgagcacttagagtcttgcagagagtcagagtttgaatcccagcacctatcaccattcacaaccacttggaactgtagctataggggatgtgacaccttcttctggcctccaaaagacacccatgcatatatatgtacatgcacataaatgaaaataacaaaaacagggccctgatgctggtgttcatggtagtaaacagtgttatttttctaaaatgacttttttttttttgtttttgtttttgttttttatagctcacagtggccctgaactcaggactttcttctctcagttgccctagtctttggattactggtgtgtgccgccatgcccacaacaaccttttggagagatttctgtttatatttagaaactgatttttaagagagaggagggaaggtgtgaggtttgtaaacaaagaatggtatttaagagcagttgggctgtatccttatgatacagtaggttttatagaaacagaggtcataatctgttcaaccttgtcccagtgcctgggacactgcttggcagaaattgcctattaagttgatgagtgtcagtgagtttctgttgtagttattactagtgttttcaagacagggtctcactgtgttgcctaggctgtctggaactggtgattctcccacgttagccttttaagggctgggaatataggtgtgatacctgtgataccatacgtgctcagttttgctttatataacattttcttggctcatttaaatttccctatcatatctgactctttaaatattgacattgttggatcacaagactgcctttaaattattcacgtgcttactgtgactatatattattgcttccttgtgtgagaccaagaggagaagcgatctgacctgggtatacttatgccactgctcatcttattattgtaacagtttaagggaggcataaacacgaggtattgaactggtctgggcagtggggggtagcagattatgtgccacaaactacataatggccattctgttccttgtaaggtgttcctcctggaaaccagagatcctcgacagtgctgcctctgccctgagaatgtgcttctctgcctatgtcagacctctccctgagatcatgtcagcccctctcttgaaaacttgaagttagcacttagaaagggaaatgactattctttggcagagtgtttaaagtctatacacatttaaaccagctttactaactgactggtacctgactccagcaggagacacactcagtgtccccaagaatttgatagggcaccatttgcccttttgtcatatgtgctgtcttcagctgaaggaggttcctgtggatcattccctgtgtctgtgtccaaatctcattcttaggaggacctcagtcatgagattagccacctattctaattcagcatggtcacaccttaactagtacatcaacaaaaaccctatttctaaacaaggtctgactcatggctgcaggagttaggactgcaatacaccttggggggggcgcggttctagtcataattttgttacaatatatgatatagatgttactctttttgtgtaaattttgtttttacttacttttgagacagggtcttgttccttagcccaggctgaccttgaatcttcctgcttcggcctctccagtctggggttatgacacatatatactacaaagagatgcattttctgtacctcacatccttttgcactattgctattaatacttgagggaaataactcatgctttggttacttgctttgtactcttggtgtggtgatccattctaacttggcaaacagcaccatgaaacagttttttttgtcaccttctaaatttatgtatagtgcttatatgtttatgtgcatgttaatgacgcataagtatagggcagagggcaacttaagggagcggattttcttttgtttttgtagattgtctctccctataagtgctgtcccagagaccttcctgaggtgacgaagcaggcagagctggaggtctggcctcaggcctgtctcattccaaagccatacttggtgatacttgccatacttggtgatagtttcctctaggaatgttccagatggcaaatgccaaaatgctaattggatattaaaccaaaataatatttatgcattctgagatacacacacacacacacacacacacacacacacactcatatacatactctgtagaccaggctggccttgaactcagagatctaccagcctcctgagtgctggggttaaaggcctgcaccacctaccgaccagcttgctcttgtctaattgaaaaagaatatgaatttaatatggttattgaatttgagttctagagatattaagtttaactgttagtcctcaagaatggctttgtaaactttgccactttggcagagtataatcttatgagcaatagggattgtacaagacactataaggagactaagtcgtctctgtctctgtctctgtctctccctccctcccttcctcccttcctccttccctccctccctccctgtctccctctctccctccctccctccctctctccaggatctcactttttgtagccctgactagtctagaacatgctatgtagattaggctgacctcaaattcacagaaatctgcctgccttggcctcctgaatgctaggattaaaaattcgtgctaccatacctagtggtgactaaggcttcttgctttttattttattttattttatttttttgcacttgtaataacttcaccctatgtattgtttgttttatggttctgggatggagcccagggcttttgcaaatgctaagcaagcaccttcctactgagttgtagccccagccctgtgtgcattaacacacatttcagagggtttgttgtttttgttgttgttgttgtattttgattttgttttgttagacaaggtctctctgttatatagttttggatgtcctggagcttactatgtagaccaggatagcctggaactcacagagacccacctgcctctgttttgggaccaaaggcatgcatcaccacacctagccagagagagtttaaatatatacatttaaaatttggcagtttgggtcatagtcaccagacttctggttttgacagaaatctccaggaatagtgcatacacagggacagctgaccctgagtgacagcaggactccatctcatatcttactcttctgctttcctcacaataactgcactaagcaggcactcgccactaatggtaaatagccatgagttacaggctgggctgtatgtgttgggatggctgccacctggcagcctggggtcatgtggcatgtcccattggccagaccttgaacatgagctgcctctggacagagggcagaggaaaaatggtttccaaagtaaatttaccacagtgctccacatcagagggacacaacttagaaaacacattagtgaaagaagggatgaccagaactttctatttttctgcagttgggggtttaagagaacaaaatgacttcccctggagaacatgcttggcattaactgccattgcctgaaacagggaaggcccaaaggcacacagctccttgcaagactgtagccttctcactcccaggagacaatgcttagcatgtgtgccaggcttgtatgaagcccttacacattttatgtaactcacacagcaggtttgtgaagtcagcaattatacatcaactactcaaaatggaagggcagaagcttttgggtttgaatccagctgtgtctgaccatacttacacagtctgctactttgacattgtccatttgtcactcctttatccacctgtcctgctgtcgcctaccctgtcactgtcctcccccatgtcctatagcagagtctgcctgagcagttggcaccccatctgcctcaggcacatcttccagattttgctttaatctgtctcttccctgactccactgctgatcactgtggcttgcagcaggcattgtaatcgtcttggctccctgtgcgttccactcccaccacctccggattttctgagagcagtcagctatctgatctcttatcaaccatctgctttccttgactgcctgggcctgcctcagcttccctatgtgggggtggcggtgaggaggggggcagctctctgggtttcctcctggctttccagtgctacactctgttgcatggtattcatgttaaccgttggtttttcaagtctgcatttgcatgtcgctttaagtcctctctctttccttaaatcttgccctgttggagacaaggtcttgcattggaaccaggctggtctctctcctcagcagttctgcctcaagattccttgagtcttat

SEQ ID NO: 11 - DNA, 12929 bp, Cricetulus griseus
  >scaffold_7 dna:scaffold scaffold:CHOK1GS_HDv1:scaffold_7:13607059:13619987:1
atagtgtcctcataattcaaatgaacctgaacaatgttgattccaggagttttttcctctcccagaatttggacattttccaactcattttgtgattcaaaagtagtgtctggacagttagaacattctttattgtgtgttgtcaagacaaattgtttcatgaaacatgggaatgaacttatgggagcccagccagatatttcagttcacatacaggctaacagcaagccccacatgcttacttcacatacagttaactgtgagtctcatatgtacacttcctacacaggctaaaagtaagcacccatgtaggggaaactgtagccacgcctccttaagggctggctacaggtttgcctgaccatgcctgtgagggcgtggtcagggtgatgtagagtgagagggtcagggctgcctttcactttcgttttccccttttggcttgtgtacagactgctgtcacgctggctggctaggttgctctgtaagtaaggcttttccctattaaatacccttatatttctacttggctccgtattggtaatttcccactttacacccatgtgatcatttcttacacatcattaaggtgatgtaattcttgcatgtaattaagatgcatgtttaatttctaaaacaaacttcaaaaattatttgaatatttaaatttactggatattttcaaacttccaactaagtattctcatgtataccacatttggatttccctggtataaacatggtacattttttagctaccattctcttgctgtgaaaatatgctatgcgccaccactgcccagcgatcatgaaaactcttataaagggtgtttgtttacagtttcagatgcttagtccattatcagcatggtagggaatattgtggcaggcatactagcattgtgttagtaataaataagagctacatcctgatccacaggaacagagacagagactgggtgtggcatgggcttttgaatcttaaaagcccatgtgagtcacttcctcagtgagtctcttccttcaacaaggctatacctcctaatcattctaagcgtttcaaacaattcttctccatggtgaccatgcagtcgaatatatgagcttttggcagttgttcttatgcaaaccactaaactttattagccataaataatgaaccaatcctgacacattcttataactaatggccatatttaaattttgtttccttgatgtcaagtttctatgtagaatgcaaaataattcttagtagctgtcctttctgaattgagtcttgatccttagagtttatcagactccctatttttaatgaccttcaaattttttagaagtgtttctcaggtattttgttgaaattaactctcacacgaatttggtagaatttcttcattcattgtcactttccccagaaactcacacaagtgcatagaataaaagcccacggcatgctcacacaaataggacatttgtatcacactctatacaagcaaggctcagggaccattgtccacatgcagcagaaagactggaggagccagaggacagagagcactgaagcaaaatcattccattctggatataacagaatcactgctctcttaagttcacagcaactatggtaacctgcatgaggcctacaccaaatcaagtcaacaacattttatcgtggaggcaagaggagcttatgaattcctactactaactgaggaccaagtgacagcattcttggggcaagatagtcacttttcttaaagaatatggcccctggtagactgaccacattccagtgtctgaccctacactcaagcagcacatgatgagcacatttgttatttttaaacaatgggaaataatttaggagggactatggatgtagtgagtgaattggacaaaagcattaggaatgaatgtgttcaaaatacaataatgcatatatgaaattctccagaaagtaataaaatatattaaagagaaatgaatcagctaggaggtggtggtgcatgtttttaattccagcacccaggaagccaaggcaggcagattcctgtgagactgaggccagcctggtctgaagagcaaatttgaggagaggcgccaaagttacacagagaaatgtagtctccaaaaacaaggataacaacaaaaaacattaatcattatctaatgcatactttttacatattatttattttctaaatttcattttcaagcttcttaaaccagagctactctctaaaagcatcattttaaatattaaaaagtagttttctgctgagtgttcagccctaactatggacatttctatatgtctatccaagattaggcaagcaccatgggactgggggtagaaatgtaagatctggatgatagggggaaaggctgtgaaatgctattttcttgggtgtgacacaatcatagaattcatgctctcagagcagctgtagctatctacaatgggtttacacaagactggaccaacacaatctatcatagatcaggaaagggcttaggagtcctctttgtcctcattgaagtcttgactatgggtgtttgctggatgtggaacagatattgtctgcagttatttactcaactgacaagtgtcccaggatacatcagatagttctattctcaagggtatagagatgacaccagttaaacaaaacagaaaaacacaaggaagtcacaacaaaacagaaaaacataggttgttgggggacaggggaggagggaagggagagggaactgggattgacaaaaacaagcttgtttctaatttaaataataaaacgccacaaatgttggaagaattcagattgtgtgtttggagatgcatggaaataatctaaatgcataacatacacgttagaagctgtaaaaacaatgttataaaaaatttaaaaagtcactgaggtgaaatgcctcatagtgatagaaattactacctacacatatgagggttgatatactagcttacttgaagaagaaataagctccacttcaccttacttcagctgtaaatttaagtaaaaatatccccattggcagtatttacacaaagagagatccttttttgcaaggaaagcattgattcaaagtattctaattatcatcacaatctatatttgactgttagatgggtgtaacaatagctctttacttcatctgccagagccctgctgctatataggcactttctaccaggccacccaagttctgcccaccaccacattaaggtcccaagtaacacacaaagacttatattaggtacagatgctgcttggccaatgactaggatttctcttctgctagctcagtcttaattatcagccataaagacttatcagatgccagcttcaggtctcctctctagccaggatcacgtggtgactccagagcagaaagcaggaggaagagcaagaaaaaaggaatggcttccttcttgcccttgcttatatatgaaactgcctgctatgtcacttcctgcctgtatcacaagacttccttttactacatttcccagaattctcctcgactcctagtcccatctaacttgctcccctattggccaactgtgctttattcaacaaccagtaagataaatatatacacagaaggacattgcccatcagatgggttggttgtatctgtgtagacatattgctatgcattttgtatgacaatattccttttattttgttttttgtgcatattcttctagctttttccattggaagctctttatcttattgctgtatacctctaacacatccccatcaattcatgtacatctttccatttacacctttatatactgtctaaatgcttatctttagtattctatgctacaaatatagtaacacgcttctctgtctctttgctctcaagcttggctaagtacttcttattttaagttgtcaccgtttacatacctagcaattatttaacactcatcttggagaatagattcaattggactatatttttccattcatccagcaacataagccagccattgtcacatgacagttataatttcagtgcacttcaagcagtgtagaaaaccatagaagatgacagtgaattagaatggaaacagaatgacggtgttgttatcaaggaggaaatcatgaaactcagaaaacagttgctgtacccaaaacattcagattgtgttgactgacacagtaagacatgatttgagaactgatcatggaactttaaaggaggaaagcaatactacatacatcaatagagacaaactctctcagcctagacacatgggtgagggtctaggccctgctcccaaatgatgtgacagactttgatgattacccatggaacaccttaccctttctatgtatcggaagaggaatgggatgagggtatgtgggggagcatgggaggatggaagggagagggaactgggactgatatataaaataagaatgtttctaatttaaattttaaaaaaggactatggcctgcctcaatcattaaaatcagagcaagagctaaatagttgaatatttatcatcctgacatatttaccaaatttcttcagtattatttttacttcaatttgttaccaattttgagaatgaatgaacctatccctagaaaactcaaatatattttggtatagcaactgaatgacccactcacctctataggatgaatatttttttggtatgagtccatagcatggcatgcttagagttgcatgatggtagaatgttaatgcttgtgttagtcatttttcttttgatatgataaaatatcatgaccaaaggcaagctacacaaaaagtaactattttcatagggccagagtccatcatgaatgggaatgtatggcatggaaacagaggcaaggagctggctgaccacatattttttttcatcaatacagaagaaacagagagagaaagatgaatgtccaagaagcagaagtatgataaggcattaagatctcacaagcccactttcagggatgacttcctcctgcaagattttacctcctaaatgtgccattacctccccaaaccgcatcacccacaggctactaaatgttcatgtagggagaaggttattattcaaagcatttcaattttaaattttcttttcctttgtctccaattccttgaacaaaagcattaaataggactaaggatatagagatacattgtacactttaaagatgaaaaattatagagtaagagaggaaaggaatgaaacaaagagtgaagggccagttgatctaagtaagtggtagatgtaatatcatcaaggggtcatgttgttagttgtgtctatgtcacaatcatttctggatgtatagaaatagttgactttattgagcctaagattattacaagtgattattgtgaagttaggaatgaggagggaagtggaaagacagaaaatcagtgacataataaaagatggagaatctaacacaagcaattgggaaataatgatttgcagtgggtagaggcagacaagtgagaaaagagcagataagttaacacagaaatggagttaaagacttgtcagaattctgggagtaagttggaaatttaggcaggagctatgaaataatggagaagattaatgcaggaatttccagttgggagtaggtgaggtaggctaacacaggtcattggagggcagacagcaaaagcgttctatatcagagtaacaatcatgacttacactgaaattcaaataatcacttaaatgatatgaaagtagggctaaataataatactgtgacagctcttaagatactaaagaacaatactgacctctttgaactagatgataccaaagaaaagcaaagcatgccttcttatgagggaattaactccaaagatttgaaatgtaatgagaattatctagatacagaaataagaaaaatggaggttgtgaaccaacacacagcaaggctaagaggaaaacagtgttcataagaggaacagaatccagtctgaagaatgcagtgaaagaacaagaaaaggtgactttgttcctggtgtgctgtgacccacatgtgcacaactgtgttctagtctatacagaggtacagaagatggagtggattagcagggtttaagaatgggaatctaaggaataatcagcatcctaggaatcctgggctgtgaagagttattgttgaaaacaaggctaagaagcacaagagggccagtcctgattacatagggaactaagtggtgacggaggtaagtaggagataaacagagggcttctctattccaattacacttacactttctaaaaccatattaatagaaattgttatgtgaaattgtccttctcatcatgccagccatgattaatggttccttttatatctactcagaaatttgttcacatgcacaaatatgaactagaccatctgatccaatttgtgggtaccggcaagtctttctgcagcgacacatatattcgccatatcatctataaaattccctctgttctttgtatctttgtctcatttatcgtggaatttattatccaagagtgtatacagatgtgccttgttatttttgttcctgaattatataccattgcagatttatttatcctgcattttactgatgaatacccagtttgctatagctttattggtacatacttcattttacaatgtttatgagtgtagcatatggtacaaaacaacaaaaatcaaacttattgcacaaaataatgctttcattctcaatggtaagttgaaattcggaaaaaaaaaactacagatgcctgtgtccagaatttctgaaaaatgctatgaagtcagaatgccaattttctaaaactttcccatctttcaacttgaaataaacaaatgtcttcctttattctaaaggttttcaactgaaaatggacatttgagcaaacataaacacaaagacacataaaaaccctgagaaatgtatctaagctagtcctggtgtaggtagttcaggcctataattccagatgctcaagaaagcaaggcaggatcacaagatcagggtttgccagttctacaaacccagatcaaggtcattttgagcatattagctagatccactctcaaaaatcaggaataaaaataacaaacatttttcagtaaagtgtcaggggtttatctcagaaataaaatatgtgccttgcacatgaaggttttagactcagtacatagcaacacacacacacacacacattttatttttttaaatgagtaaaataaggccagctgtttgatcccaggaaattcttgacatgcactaagattctccaactgaacagttttctccatctttccccagcattggctgagccctgaagaacagtctcaatcctctgtgaaggaaaaccaccgttttgcttgatgactattctgcagatccacacaccaataacagagcagctgacctgtaggttaatgaacatcttgtctcctcctctcttaggcatgtaatgtttttatcaaaaagtattttacatggtgattttactgggtcctttaaggaaagatcagcctggaaaaccattcctgacactaaaacactgctcccactgcatcatcttctatgtttgtgagacatgtggaaagccttaactgcattttaacaacataaagttccctgataacatattctagatctgcttgatcatcactttctgaaaactcacagcaggactcctttgtcacaaacacccccacagtttgctgaatgtagagaaatcagaaatcaagctgatgtcttcaaagacctttgtccctaagttctagtccctatgttgcaagaaggtactctgcaggctgcttaaagagaaaccaggacaccaacccagctacaaaaccctaggcctacaaactgtcctgctcaaaagatgttctgggacaatggtggcataaaatttgtgggagtggccaaccaatcttgtgttaacttgaggcataagccaagagagggagaccatgcactatactgcctgcatggccaagaactggagactagatagcccagagacctagggcataaccaagtatgaacagcaaaaaccaaccaaacaaacaaacaaacaaacaaaaacccattgaaatgattcctagtgagattctgctatactcataggtttgtaccttgtccagtcttcctcagagagactttctctggcagcatatgggtacagagacactcagccagatgttttgctgagagagagtgtgaattggaagtccccatctttttcctccccttagatattgggaaaccctgagaatgaggaggcagaaagactataggaatcaaggggaatggaggacaccagaagattgtgacccaccaaaacaactaagcagggctcatatagactcacagagactggaggtaaacgtgagaactacaccaggtcctctgcataatcttatggctgttagctcttggtgcttttgtgtgatggtgcatgtgtatcttgcacatgcttgcctgcacttggaactcttactgtccttttgtatttccttatccatccaggatgggagagtgtttgtcttttttgtatattatttttgttttgtttggctctgtctcttagagtcctgctcttttctgaagaggaaacagaagaggagtgaatctcagggagaggaaacctgagaggagtatagggagaggaaactgtagtcaggctgtaatgtatgggagaaaaatctattttcaatttaaaaaattctcctccctgttttgacttcttttattattttttctcatttatatgagataagtagttaaaataaagaagggctacctaaaagcatattcgcttaagcaagaagaaagtctccaacattaaaaatatcatgtggcaatcccatattttaaaaggttcctatctcagtctaattttatgtaaacataatgttttcctccacatacttgaggtagagtcaaagatttcaccttgaattatcttggagttaaggatagagtagccaggtgtcagtgtcatgttgtcccaggaagcagtgaaagcaggagagtcactcttgcattcgaactctcctgtctttcaattcataatggctcttggctgattcacaactgtgttatgaataaaattcaacttcagattcattagtctatgggagaaactccttagagtaaaaggactcaaatatgccaacataaaatcacaagcattcttaatgatgacctcagactccaacagcagatttctggtataatttccttggcttgccctatacgtgacttagtacatttggaaaacaaaattagtatggccagcctttttctttacctcaataatgataataaacaaaaacacatcagactgcatctgaggactttagcagaggtttctccacttggctgtaacctgtctaactgatgcatctaccattatttctgaaagaggtttattgcattatttgttctgttactataacatgttgtgaaattgttagcatgcctgaatattgtatatggggcaactggtttcaatgttttttgggcatggttatttgttttgactccagaataaactatctccttttctgtttgagagctgttttctgtgacttggccatgctggacttttagtcactggtgttttctttttaaccctttggattggctttaacgaatacaagttgaattgattacatagtctgtaacatatacctttcagttttcttaaaaatctaaaattgtcttttctaggtattgtaagatttttcaattattccaaattttacctcactttcattattcttttccaagaactgactgaatgttaatattctctctttctgcaaatgacctcttcatctcaaacttggatttctgtctctataactgtctcgctgtctctttttctttctgttactccctgtctctttctttctctctttgtctagctatcatttgtcctccttatatatgtgaaacatatattgagtagaatgacaacagaactttcaaccttaatattagagtgtatttggatttagagaaagactcaaaaacagacaggaaaagagatatgactggagaaagcaagatacactgaaagaccaaaatagggagagattaagggatgaaaaatataataggccgaagagaacacaattctgcagtttcttttgttacacttatttgttacagaaagtgaaacactgactttgtatagatgttaactgtatttcctaagtggtgatatttacctagctgttttcaatcattcataataattcataaatacctgtaatgccttaacagacaaagttaatccaaatatttaaccagaatgttaaaactaaatagcagtgcttattcagatgaattttacattctttctcctgacaggatgcttctttattatacaactctgaatactgacagtgatattgttcatgttctagatgaggtgatggctaatcttaaaaagacggtgtacacggagcttttagtttcagaactgaagctgtggcaactgcagaaagtaaaactgggcctcctgtgctcaacttaacaattcaggaaacagtatcaaaatagaggtgatcaagacttattagatgtggccacattggaaaggggaataaataaagaagtccagtgactccaagcctttgggtatctaggatcatgacatgaacaataagtttagtggtagggtgaaatagctgtataactaagctgtcctggtcaacttgtagtgctgcacatcactgatccatccttgtctctgacagagtctgtactgcaggatgattcagaaaactgtcccttcctgggctggcacaagtacgtcagcctttaagatcctaagcattacattcctggagaaattcattttttaaaattttttctccattttttatttatattagaaacaagattgttttatatgtcaatcccagttcactctccctctgctcctcccctgtcccccactaacaccctacctatcccataccatttctgctctccagggagggtgaggccttccatagggggtcttcagagtctgtcatatcctttgggatagggcttggctctcccccatgtgtctaggttgagggaatatccttctatgtggaatgggctcctaagtcaattcctatgctagatataagtactgatcaactacaagaggccttgtcataaatttctgagacctcttcactgacactcaattcatggtgtctggatgaattccatcctggtttcccagtgatcagtctggggtccaagagctcccccccttgttcaggtcagctgtttctgtgggtttcaccagcctggtcttgactgctttgctcatcacccctccttctctgcaactgattccagttcagttcagtgtttagctgtaggtgtctgcttctacagccatcatctgctggatgaaggctctagaatggcatataagatagttatcaatctcattatcaggggagaacatttaaggtagcatctccattgttgcttggattgttagttgtagatctctggtctcaatagtggaatctagaatggctgaaagacacataagaaagtgctcaacttccttagccggcaggaaagtgaaaatcaaaacaactctgagataccaccttactcctgtcagaatggctaaaataaaaaacaccaatgatagcttatgctggagaggatgtggagaaaggggaacactcctccaatgctggtgggaatgccaacttgtacagccactttggaaattagtgtggtgattccttaagaaaatgggaatcagtctagcacaagatccagcaattccacttttaggcatatacccaaaagaagcacattcatacaacaaagacatctgctcaactatgttcctagaagcattatttgtaataaccagaacctggaagcaacctagatgccccttaactgaagaatggatagagaaaatgtagaacatttacacaatggagcactattcagtggtgggggcagggggcaggcagtggaatcttgaaatttgcagacaaatggatggaactagaagaaaccattctgagcgaggtaacccagtcacaaaaagacaaacatggtatgtattcactcatatatggatttgagacatagattaaaggtttactggcctacaatccacacctccagagaagcttggaaacaatgaggactctaagagagatatgcatggtcccctggagaaggggaaagggacaagatctcctgagcaaattgggaacatggggggaggagagagggagctgggagaatgagaaggggagaagtggagtgatggggaatgtacttctttgtatgtttatcttattgattgttgactaaaatactgtttggccaatggcaaacaaggactagtatcaaagaggattctgggaaatgtagtagagaagtgatgatccaggcaggaagtgacatagcaaggagactcatatttcaagaaggagaaacaggaagtatgcctcttttcccctctgctcttgttccagctgcacgatgtgatccactagcaaggaaggacaccaataaggcatcctataagataagtcttataaaatatataggtttatgatagttaagaccaagctaatagatgagaatcctagtcattggccaagcagcattgtacctaatacaagtttctgtgcattcatttgggcctaactcgggtgggtggctggcatgctcacacgtggcggtggggcttggcggcttttggtggaaagatttatcataacagtggagaggtgaggagaatataagggagcaggaagtttgtgtaggaggaagaatagaggagagcaaaataagagttaccatgagaaagggagccattataggtttgaagagacatcagacactagggaaa

SEQ ID NO: 12 - DNA, 62941 bp, Cricetulus griseus
  >scaffold_8 dna:scaffold scaffold:CHOK1GS_HDv1:scaffold_8:21329984:21392924:1
tacaaatccaatccaattcaatccaatctgtcctacattctgtaggtattgtgcaagcctcttattaatgtcagcagttggctattggccagagcagtcagctagccaggcttctgtacaacctcaaaccaaaactctttttctcccctcattagggatgtgaggatgctcagccaacagttcagagtctgctatacccaagacccaggcaatggctctagggaccatgagtcaggctgatgtcttaggaagggcctcagaacaggcagaaggtgtgttggacctctgtgaagtcatcataggccagggtcttgtcttcagaacttgaacttggtgagtacacttgagaggatctgttcaatgtggctaagttcagagggacacgactttgtaaagtcaagtggaaatttaattgttttttaaaaataggagttcaaaattggactttggctttttatagacgagggcttccctgaggagcattgctgcaaatggcaaaactcatttcagaataaaggaagctggactaattttgggttgggagatgatgcctcactgagtaagagtgcttgctacgcaagagtttggatatctagcactcacctaaaaagccaagtctggcagcagtgggggatggaaggaacaatataagatccctgggcttgctggctgcctgcctagctgaaagatggccagctccagcttctctctgaggcctcttctcgagggactaaggtggagagagatagcagaggacacccaatgtccttctctgccctccacaaatacaagcacgtatgcctctgagcacacacacacaatacacatctatctttacattgaattaatttaaggaataggtatgctttgataacatgaaaacaacttttcttggattttcaaactaaacattatgcacgttcctggatatagtagcagcaacagaaaattcagagaacacactatagatgcttacaaagtggtgtcaaagtcaggttgataaacggtagtttattggggaaaagtactcaagcaagggagccagtgatcaggcttgcacctgggcaggactgacccagaaatgcttcccagtcagcccagccaggccaaagagaatcacatccacccaaaggaaggtattagtaatatgtatgaactatccttaagtattatgtaaaaagcaattagactatatagactggttgttagcatttttttctttaaaaacataatgtggttttggacacatttctgttccattaattatatgccatacttgtaactagctatattaaaaaggaacattttttttttctcaagctgtgagtaggctgagaactctcccttcccattgaaaggcaccaccatctgacgccctgtttccccaagacccctggcgcttgcgaggaactcactgacctgttatttctggccaacaccaacaggcagccaaaaaagcagctgcttcttctctagcaaatgacttcacccttcagggcctcgggttggcctcaagttaaatgagaagcttggctagcgatttgctgtgatccgttcagctctaaaatgccacattagcttctcattcacttgtgtctgtgtttgtcttggcacagggtaaccccagtacagtgtaagaagggctcccacaggagcgctggctgcacacctgatgttacagtccacagcctgaagaagtgctgctggcagcagatagttggagcgggcaaggcttggggaggtataggcctgtgcagggttatattaaggagagcatctctgctaatttccacagtggcaatggccatgtttgcaggaggcatcatatattcacagcatagaaggaagtacagcttttggagccagttagtgcttcctgagcaaaagtctgaactacaggatagctgtggatcttgttttctgttttggaagcccaagtcttgcatacattatctagtttccaaccctccttttcagttatctaacttatttatgtcagggtagtagggggacatagagtctcactatatatcctacaatggccttgaagtctcaatctttctgactccacctcccaagtattgttttcacgttaagccaccagaagaaattgagattcagaagcattcactagcttaagatcagatgatggatgcagacaaagactcagcctgtgcctcaccaatggattctcgcccccatcctccagtttccagggggatacatagacacatacagacccatgtacacgtgcagactgttgacacagacacctccaccatcctcacctcatcgacacccaggaccaagacagcatggccttcccctggattcagccacctgtccaacagtatttctaagcagttttttaagtattgtggatcaggtgatgacacaggatacatggtttctggaatcacggagttgccccgtgatcctctctagggtgtaggatgagataggggcaggttggaggggagcaggttatatcaggtcagtattaggaagtgtgggggtaaaagggaaaacatggacaggacattccttcttcctcagagcagtgagggaagacatcatggacctccaagctgatgacttgaggatttggtgaagcccaagatatgccagagaatggcgtggagactgttacatagatgaaagagcatgtacagaggctggaggtgggaagcacatgacacttggcacaccgatgggagctccagtgaggcccagattagtgtttggggtgagtgggggggaggtagtgtccattgaggctgccgaggaggcaggtatctgagagtgaagggctaatgtgtctggtgtagataaagtcagtgtctggactgagcatgtcagggagccattgaagggcactgaagggcttggcagtacagtctgtttagacactctccttttgcccatgtaagaatctatgtgtatagtcattttgtgattctctattaaaacaccctggttgtgatttctgcaaagatagagttgttctactttagtatacttttccagtttgagctgccatgtttttccaccaacttttgtcactctgtttagtctctgtggttggtgccaggttagttcagataactcctatgatcaagtaccatggctatgtgggaatgggggccaaacagcttttaactgtccctcagcctctgccttgacctcttgccttagattctaaccgatagaacattggctgatgagataacttccctcaccaatcctgaaaagcaagtttgaactatgattcaaaacatatggccagcaaattttactctcatcctaagcaaaatgaaacagtgttaatattcaattctctaaagttaatagaaattactgatatgaatgatcatataacatgttcaataaatgatcaatttatttatatttaatcaatgagaggtgtctaagggcacttataaaatggtgaaccatacataaataactagatgaataactgtgatatttttattaaaatatctatatttgcttatacatatatgcagggtagccattgaaatattccccccaaaattaagtcattgcttttaaggagaggaataggatggctatggtcacaatgggagggagagttttttggtttgtgttttttgtttttttgagacagggttcctatgtgtagccctgtctgtcctagacctcacaccatagaccaggctggcctccaactcagagattcccctgcctctgcctcccgagtgctgggattaaaggagagcaagagtttttttttttttttcatgcactttagaatctttcatgttttcaacaacaggagtgatggtacttgatttataaaaaacaaacaaacaaacaaaaaaaacaaaaaacaaaaaaaaacctgtgcagcagaattccatgagtagttctcaagatttactattatttgaaatcagcatctttcaaaacatatgcatctgtgctgaatagttttatgtaatattcagttattttcttaattagttattgatagagggggcccaggccattgtgggagatttcgtccctgggcaagtggtcctgggtcctataagaaagcaggctgagcaagccaggggaagcaagccagtaaacagcatccttctagagcctttgtatcagcccctgcctctaggttcctgccctgtttgacttcctgtcctgacttcttttgatgatgaacagcaatatggaagtatatgccaaataaaccctttcctccccagcttgttttttgatcatggtgtttcactgcagcaagggaaaccctaactaagactgcactctataatttttttttgtgaagaaatgatgaaaattgttttctatgtgtatttttagtatacacacaaaaaaggacagtatcagtgccacagcacaacacaagggcaaggagccatctggcctgtgtgcatttaaatgaatgaaaacaaaaacttcattccctcaggagcactgcaccattcagggcccaatagtcatggctagtgactgctactctagacagaatatatggagcttttacattatgcaaaaagtcttctagataacactagtgtagataaacaagcccagactggtaattgaccaacagagtgacaaccttataagatggaactttatatattttctagatcttctcatattgtttgatagttttttttaataaccacttttgtaattttacaagaggaaaaggatggcttgcgtctgtagcaggtgttcatttctcattaaaatcacactctgaatttttttcctatgtgtgtttcctatgtgttgtgtcatatctgagaaaagggactctgaattgagaaaatgcttccataaaattggcctgtggccagactgtggtgcgttttctttcctggtgattgacgtgggaggacccacctcccacatctgggcaggtggcactggttgctacaagagagcaggatgcaaaagccatggggagcaaagccagtgagcagtgcttctccatggtttcagttccagttcctgcttcaaggttttgccttgagttccttccctgactcccttcctgatgacctgtgattggggcatgcaagctgaaacaatgtctcccaagttgcttttggtccttgtgtttatcacagcaatggaaatcctcagataccaagagtcaaacattccattcagaagccaagagagttacaggaggagttgccaggaggagctgtattagttttcgttttgctacaatgaaagaccggaggcaggccaattttataaagaagtttgctggccattttggaggttcatggtcatggtgctggcaatgcctcagccttggtaaggacttcatagtgtgataataagatgctacgtgagaggaagagttcaaatcacattgagaggcataaagccaaagagcctgatgatgcctggagagaaaacaccttaagttgacttcaggatctgccactgggcctacatcttaaaggtcctactatctaaccttgaataccctcggaccaagacacatgaaatccaggatggaagtgaagcacacaaatcaggagtcattcgggtaaagatgtaatgagattctagagcgaacacagcttaggaggcacttaccaggtcagggtgaccatggtgccccatctcagtcccccctgggctgtttttttagtaacacaggatagaaacactttcagtacctgccctctggcaaagtaaatcttaaatactttcaattcttgtgcttctagaggaggaggtggggcaatggactgagaggtccacttctaaggaaacctgatgtctcccaagagacaaagacagggatggggaaaggacactgctttgaggtggggcagctatctgagtggaacaggagcccagaaggccaagcttaaatggggtagaatcagaaaggacagtgggtgtgatatctgcttgggaagggttgaccaaaatttctgaaagacaaagaggtgggatggaaaagaagcatggccaggaagcagatggagggaatggtcacacagcttttcacctccaagggaacttggatttgagatgttaaacacccttctggttatcatccacaagacagagcaaaatgacatttcctaaaaacctataataaataaaggggacaaactttaaactctggtttatagtcactcagatcagacctcaatttctctccaactgaaggaagttcattccttgactggggcagtgttttctcatcagcaatgacagaaaccacagaaaggacatggtagctttagagtgagtgtgggtcttttgggatttgtcctttatcacttgagtttaaggagacaggtttgtcaggaccattctcctctccctggaagagttgtccatgcagtcagtactgtacctgttcctgaaaacacagcccatgcaaggaattgccatctccctcctgctctcttgagaatgcggatctggctggactgagctacacctctacgcctttgtggagccgggcctctaatctagactatctctccttcagggagagagcccactcatccaacaggattccactcctctgagtcagcattgatgttatccacttcctactgggatgtgtatgaagatcagcttgggacaagcctgtcttttgaatgagatagtgattctcccttagggacaaagaatgcttgttcattccttcatgccttcttactcagaagctgatgcatggtaagagtgtcataaatgtgggtggcatttgatgtccttttcatcctgcacctacaacaccaagttactgttactggtgagctgatcatatgtgctaggagaaaaaagaagagagattgtggttggttgagtaatccttcccctcccccaaggaggtctacatccttattcctggaatctgtgactgctgccttatatggcaaaagggactttgcacatgtgaccaagttaaagatcttgagatgaagttcgcttggatcacctaagtggttttgttgtgaccatggggtctttataatagaggtgggagatgcagatttgagaggagaggcaggggtgaacacaaatgataaaatgggggccacaagtcaaggcatagggatggcttctagaaggtgggcatagattagactcttcttagagccctagggaagaagctaatcctacaggcctaatgcagaggaggagccaatggtcccagtttgcaaaggagttcatttgactcaaggaaggaaataacttaggaattctgacaattgatggaggtgagaggcagtggaggtctatacaagggcaggcaccttgggagtagaaatgagtgatggctggagctgtactggcattataatggacagggatgttgggagctagaggcagaggtagggagtctgggttctctatactaggtcctttcatctatcactttttgcctggctggattttaagacatgctagacaactgatcccaccccatctcacccaagtgcttgtcctgcagaggtaacttttctgctctaaaaagctcgtatctttaattctaagtttgtgttgggaagaatgaagctgataagaccccactgacatgaaaacagttgatagtgtctttaatccccgagacttagagctttggagccttgacaaggcatcatagaataagagtctcttaagagaagctcctgaaaccccatctcctaggcaaggcctcctgacctggcaagtcatctggttaagagcatgcgagaatctacttttcagtatattacctggtggtcctgggatggtctttcaccatctctaactatcctcctggagatcctcccaagtctagtctaaccagtttcctctggacggggtctcgtggtacagacaggctggcctgggatctgctgtactatatactcaagttctaggctcatgatagcctagaacttgagatcttcctgtcttagcctcatgaaggctgggactattcatataccattcatagtaccagtttgttctcgtagccatttgaaatgattctgggctgcctgaatggtaggacattgagttctccactgctgttggctctcctttagctatctgtcaggtggggctcacctctgcctggttaaggcaaagttaagaagggattatacagtcagacagagagagacaggcctcatttagaacttggatttgccaaggaccacttatgtggtcttagcaacatcacttctttgaaccgttcttttcttattgaaaaatagtggcattataagtgaaataatccagccacaaagggacaaatgcttccctcccatgcctgtgtggtccttagagtcatatcctggagatggaaactagactggggattctgggtctgtgggaggggagaccagggagttagcatttaatggggacaggactctgtcagggaaggtgaagtaattcagaagatggacaaggtgacaattgtgcaagaatgtaaatgtgctcagtattgttgaattgcatacttaaaatggtaaaaatgctacatttcatgttatgcatattttgccataattaaaaacaactactggtatagctcagtgatagagaactcacctagcatgcccagggccttgggttctgtccctatctctgcaaaataagtaaataattaaaacctaaagagtaaagctattaataatacctacttttcattattacatccaaccgtactaccaagctacagagaccaaatcagcatgtttgacaaaaacaaaacaaaacaaaacaaaacacagatactccaactaataagacagaaacaagccaagagatttacagccagttaagtctttacaaaggcaccaagacaataactagatacataaatgtgtaacaatgaaaccacatccataacaaataaatcacctcataattcaactcaaaagggattgaggcaaatgttagatcccaaattatgaaacaactagaagaaaaccacacaggaaatgtctcaggatattagtctgggcaaggacttctcagacaggaccccaaaagcactgactccaaaggcaaaagctgaagaaatctcagcaaaggaagtttcaacatggggccagacaatttgcagaatatgagaaaatatttgcaagccactcacttgaaaagggattcataaccagaacatacaattcactccaaaaactcaacagtaaaaccatcctattagaacatatgccagggctggggatttagctcagctggtagagtgcttgcctactattttagaggccttgggttcaattccccatggtgaatcaagtgctcacgaagatgctcacctgtagtgctagcattcagatggcggaggcaagaggatcacaagtccaaggtccgtcctccttggtcacatggtgagttcaaggctatatgagaccccgtgtcaaacaacaacagaatgagtgcaaataatctgaacacatgtatctcaaaagaagagatgcaagtagctactaaaagtgtacggaacagttttcaccatcacaattcagggaaatgtgattcaaagccacagaagctgccatctcaccctacatagaatgacaaccatcacccaagaaaaataacgagcactagtgggtatacagagagaggggaagtctcagaactctggtgggaacaaaaattggtatagtcattatggaaaacagtatggaagtttctcagaggatctgggaatagaatcatcctatgatccagcaattccacttctggatttgtatctaagaaaacggaaatcggtatgtaggagaggtctctacagttctacatttattgaaacactgttcataataatcaagatagattgtcaagctagccattatcaacagatgaaccagaaatctggttgtgtatatacacaaccagatttgtgtatatatgtatgtgtgttattcatcacacacacacacacacacacacacacacacacacacacacacactggaatactatttggccactaaaagaagcaaatcctgtcatttgggcactagggatactcctggggaacaatgtaaaatatgtcaggcatagaaagataaatactgtttattctcctgtgtggaaagctactttcatgaaagtagaaagtataattgtgcttattggaggctgggaaagctgtgtatctgagataggatggttagtgggtactgggtacagttgttaggaccaacttagtgttcagtagtacagttgggtgattatcattgacaataagttacatatttcaatcagttactagaatgattttaaatgtttccagaacaaagaactgattgatctttgaggtgacagacatgccacttaccctgatctgatcgtcattgtactcaaatgtcacactgtgctccacaaatgtgtgcaatcattatgtgccaaagacaacataatacctgcctcccagagttgttttcagagacacatgagtcaacactgcaaggcctggtgagtggcagagtctccataaacagaagctgcaatcccacatttctgactgaccagagtcctgtcaggcaacaggtacagcacatggggcagacacaacatccagcagactgtctgactcttcacagacccagactgtaacaaggattttgttttcaggaatccactatggaagggttttttttttttttttttttttttttttttttttttttttttttttttttttttttttttttttataacagcttagaacttggattaacatcacacggttactaggtgttggggttggcaaagatctcagagcttttcgggtgaggatccattcgttactatgctttctgctctaatccctggaatctttgtaaaccacacttaaattgaagatctctagtgtcctagagataggccaggttgaatcccctgggtcttttcggaagtgaccagaagaatggtctgaaaggtaagtatcactggctttaaagaagaagggcgcagaagccaaggaatgtgagtagcttctagaaggtgcaaaggtaaggacatggattctttcccagctccctagaaaggaaaacactcctggtacatggtgagacatgttagccttccagtactggggggtagtgctctagatttatgttatgttgttaagtctgtgatgagtggttatggcagcaacaggaaatgaagaggagggcttacaagcaggaaggccacctcaatgcttgaagttgattttacttgctgacaacaaggagcacccttggcaatttcacttgtcatctgcagcatttccaaccatcactgcctagatcaccttgaatgagtgtccccctttaaaagcacagagagtatatacactactgtgcttttatatataaaagtatatacactactgtgtcacttgctgtgacactctgctatcttcccagagtgcaggacatagtccttgacccgtgctatgtgggtctattcctacagcccagcagagatgcagctactgcacacttagatccccaagttcagcccaccttgacatcgtgcggcagagagacaagcacatgtgaaggacctcctgcccaggcattctgttcaaatttttccttcttctgaagcccagatgaaagcagcatggctatcactgtaattacaaactgtcacaacacatactccgacccttatcttggattttgtttccctgggagattactaaagaaatgtgaaactcgaaaagtttgccatggtccagccccagttatgttcaccaacagatatgatccttagaagtagcttttcaatgcagccaaccataggaagtaaataattgtgtgtatctaagagaataaaagaagcagccacaagggacttgtgggaccgtgtgacatttgttctcggcgctctcaacttccacagctctggatccacattctgagtgatgaggctgaacctggccatgacttcccgacaccatggtgatcacatctccgggaatccactaatgcagccctggttccttcacactagaaaatgacccagaagaaagtctgacgtcataggaaaacaaacggacagacttcctccaaaataaagttggaaacaaaactcaatatctccagacactctgttcccataaaacattttaaaagtttttttttctcttatggcttaaaaagtaataattcatgtctcctgttgacattggtgcaatagtaaaagaattctgaggctaatcaagtcacatggcttcatttaatggcttttcccagcagccaactcagtgtggccacagcagtatctatcacaaggatgaagttcatctaaagaactacagaccatagccactggcatcagcaggatgtggctcgtctaaacaagccctggaaagcaggtgtctgaggaagaccctggcaggagcagccagcatgggtccttccaacttgctgggcacactggtggaatcatgtgtttcccacggagccactgcagcttcagcacccgggcagatggccacttaaacatcttttctatgttcattttgttttaaagggacccaaacacgcacatgtggaatttaaagaatatctgactaacctttagctaacattaattttgaatttaattacttatttactttttgagacagagtgtctctatgtagtcctggctgtcctggaacttactatgtagaccatgctgaccttgaactcacagagatagatcctcctgcctttgcctcccaagtgctgctaaggaaggcatgcaccaccatgcaccatctttaaattaaatcttgaaagaactatatttttctcattgtggctaaattttttttaattcatatttcaaaactcatactctctctagggactctatcccttttatcctggagccaaattgtctccaaggccataaaggaaagggaggtgggatctatgctccatttagaagtccagcttcagatgggggaatacaggatgttcacagatgacgtcataggtgtattttcctgaccttaagctgtaggccctgtgcccaggtcactacattttcaagctgctccactggggccccaggcagggttccattgttgactctgagcatacttcagagtcttgcatttagcactgctttctctagaaaggaaaatggcccctctccggtaacaccaagcccatgttctagcctttagctatacaacaaaggattttccaaatatggacccaaagagacatgtgcactttgaaggccacactgacacttgaacagctaaagcttattaagaaagccaacaattgatgccaaacgctgcgtccctaagtgaacagcaagacaaaagccagaaagaggaacaaaaatatgcattgaaggggaggggctaacagggaggtgtcgatttatatggaagaactgacatcattgtttcccagtaatgctcagcatgcaggaaacagatggctaagaagcagtggaaggggctacttagggcatgggggcttgcaatgcttccaatgttgccattgggaacctacatgggaagttttactttgaaaaaccaggaatgggaactctgttgccagttttataagttattttattgaggttagtctggcaacacacgtgaaaatggaactcttcaaagcccactgccagcaaagccctggctgtttgggaccagagcaggcaaagtcatggagagaaactgaatgttcatcaaatatggttggagttctgattcttccacttccgggttaggtggcaccagcaagtaactgtctgagttggtcctcgcttgtcaaatagagacggatgaggttgagattgaacatttttatgccgtatagctataaactcaagaaaccaaattagctatgagtgttggtgaacgcctttaattctagcacttgggcagcagaggccagcgaggattagtaagaccatgtctcaaaaaactttttcttaaattatttttttaaagtgggggggaagggttgccatgcaaccctgaatcagatcagcagattccatggtagaaggagagcactaacttccacaagttgtccttcatgcacacacacaataataattaaaaaagaggaacgaagtcagggtgggcagtgtctcctctttctctgagcatgtgtgtgcatgcctgtgtttgtgcaggtgcatctgtgcgtgtgtgggcactgcgtggaagccagaggagaacaacaggagttactcttcaggtgttgtccatcttgggttttgacatggtctatcacttgtctggaactcagcaagtaggctaggctggctggccaacaagccacagggatccccatgtagccacacctgcttttcttttaaacatgggttctgaggatcaaacagcaagcacttcactgacagatctatagccccaggactctttgctttatttctgctactctgttcctccttgatttccttcctcgttcatttttcttagttgtttgtttgttgtcatctgtcttctccgtctcctcctcctcctttcttttggtagggtctttctattagccctggctggcttcctagctgtctttaaactcaccatggagtccagactggcctcaaaactacaatctttcctacctcagcatcctgagctctagatttataggtggataccactaagacctgctgcacagttaacgtatatattttttgaaaaccttatctttctgtaaagtggcatattttgctgtgtccaggaaagaaacaggcacaggaacagccaaacagaccagtggccactcctatccttgcagctgctgtgtgctcacctaatggtggagtccctctcctaccctggagacaggctcctgtcttccccatctcttagctgcctttccagagtttagatctcctcaggatgcaggggctgtgaccaaccccaaggatcaggcaaagccacatagtttcccacctctagactccagtcacccccatccccatttctctgcgatcccttacagtcagatgatcgttgtttactgactctcccagctacaaataaccctttgtccagtggctgtcagtcagaggcttcacatcccttgcttacacatcctctatagccctcacctcactcttctttatgctttgtatacctgtcttttgatcacctctaggccaagacctttgtaaactcagtagggcagtggttcccaaccttcctaatgccaaggctgtttaacgcagctcctcatgctgtggtgacacccaaccataaaatagttctcgttgctacttcataactgtaatgttgctactgttatgagtcatagtgtaaatatctgtgtttcccaatggtcttaggtgacccctgttgagaaccactgcagtacagtctattgcattaccattccattaaatcttcgttgctttaattttgtagtcccaccaaggtagtttctgattaaaaacctaaggatgaggttggaggtgtaggtcagtcctacagtgtttgcctggcatgtgcaaggtcatgggttccatactcagtactgaccccctgcctccacacaggctaaaaattgttttttaaaaagcagaacaaaacaaaaagtataatcataaagctccagggaaagagatattcatatgtgtttctgcagtggccctttccaagcgttgttgacttactgatctgctggctgtttccagcatctgtaacagtataagctggtatatgtcccttttcaggggtatgagtaacgttcaaccctctcccctccaaaggcattctgggccagcatcaagcaatgggtgtggtgccagagcatgatgtaccagccaagcttgaactagaacaaaaagtgccagagacttgatctcagaaacttaattggttcacaccaaggagtgaggtggtaaaaggcagtttctgcagtgttccatgcaaagcctaggttgttttctgtctaggactagctgcaagcccccatgggatcatgaaagagtggattcctgataatacagcatatgagcagagtcatcgtcatcagatatctgaaagggctccactacccacttcctagataagaagatagatcctacatagatactaaaaatgctcatgtgctcaccaaaggctcacagagacaggcatgacccactctgtctgtatgaactaccttagctgagcttgctacctgcatacccatagccagggacagcacagaacagtgggcaaaacagagaaggaactgggagcctctgactctaaggccatgggtattttcagaaggaaggaaggaagaggcttgtggctgcagtgggcaagaaaggacctatgggaacttgaaagctagtgggtttggataggtgcgtgtgtgtgtgtgtgtgtgtgtgtgtgtgtgtgtgtgtgtgtgtgtgtgtgtgtgtgttttctcaaatacatgcacaagatgtttacaaagcagtttgcaaaggacaaagtgcttcttggtacccaattgttatgactatttctgacttgggctgggagaaagcaaagcaaaagacaaaatatttcttttagttttgtgaggaataaaatttcttaactacaaaattatgaattattctcctcttggagatatgattccagtctaaaccttgggtgtcttatagagctgggtttaaatcttgcattttatcatctggataatcttggtgaacgatttaacctcttagaactcagttctcctctgtaaaattggtgggggtgaaaacaatttttaaggaggttgaaaatactcccttgagtgaacaaagtgacttacaaaaaaaaataagaaaaccaacatagatgtcactcctgctaatgataaaaataacactgggtctcttctctctttccaagaaaccttcctctagtccctcccttctcctcccttcctcctccaaccacctagcaaactgaagccagcctgctttttccagtggaggagagttccttattttaacctttatctaaggttgcatccagggaagtgtagttcagcagaggaggctggggacccgccttacatagtacttaaggccagccttttgagagagaggcacccaagatcagttcaactcaagcatggcctttgtgttggagccttgggagaaatacttaagaggactggttggcacatggactcctaatattaatttgaagagtaggagaagtgggggtaggggaagggatgctgcatttgatttaaatgtgtttcccacagtgtatgggaaaagaactcattccatgttcctggcttcaaggctggcctgtaggaaccacaagaaggaagtggggtcctgagacccttgggccagagttggatagctcagcatgggcagtctactccggagggaatgagcaataggaagccctgactaggttgttttaatcacgacttccagaaacattagctacaatatcgagtggcagagtgggtggcggttaaaggttcccatgcccggcctgagtcttggaactttcagccccacccacttcttccacccactgctcagagccacacacagcatcgaaccccaggaaggagaggccatccctggaaacaaattgtcccagcaagggcttgagaattgtcctggtcaaacaaactatggaattctcagtgtttccctccctaacaagaaagctttcaggctagcccgcagatggtgtacagtgctgactagcctcaaacccacaatcaagggaatagacaatcacatccaacactacggtctgggtggtgcccggagctcgtttctacttgggtatgatgtgctctttctctgtctgtctccttctgctccagttctaggggtgacacacaagctctctcctgtctagcagatgggtctctggctccaggtaggtagtggggtggtggtggggggtggagggggggttgggggggagtcgggggcttccttagaggtaatggcactgggccttcctgaacttgggaggcatctgggaagctgccagaggggttgacatgggtgaagtgagggtaaggctgttcctgtggtcaaggagctcttggcagagatccgaagagcctgcagaagggagccatgtggtaggtggaagtagctgtttccattctctgtgtgggttgtttgttatacccagaaacaaagtagttcctgcaggcctgagggttggctgggcagtttgctgtgggcttaatgcctttattcccttctcttgcctcttccagtttcactcttggcagtcccaggtagggatgcctctctccgctcaagcccctcaggtccctgttctgtctccccaatctccccaactaggacctggcttctctttcagttttcagaggcctagaagtaattggctctctggtctttaaaaacaaaacaaaacaaaacaaaacaaaacaaaacaaaacacaaaaaacttgctgtgtatcacaagctggcctctagcttgagatacttgtgcctaacccggctttcagatctactgaagcacacttttcttttccatgcctgagcactgacaatcttctcagcaactcccagaaggtcctgcatcaactggaatctctaccagtgtggcaagcagccctgcttccattccctctgcgtgtgtgatgaatgtcctcgcttcatgaaagcttcgttcagtcttggtggctgtggtagggtaaagccaagctattttgacagtaacaggttaccacgtggttgtcctcaggtgatttacccattacccatattaacccacatgttttcacatatgttctattacctctgtttcacaagaggggaaactggggcccagaggtgggaagcaagtctcttcagggccagtcatctgggaataagcaaagctgagattctaggcaggagtgttccaggagtcttagtggaagctcccagcaaagttccctgacttggattagggaaggcttctagaacttttcatagctgccaccctcttggtaaggtattagctggggaaggcatgcaaatgatttgccagataacgattaagctgcagaggatactgcccctgtccccccattcagcactaaatattgagagcttgtttggaggttctagcaggggagagcagctactcgtatacgcttgaccaaagactggtcctcctctattccggggaaggtcgtcctcttcgactgagcgcgcagctttgggagggacaggagggatgcacatggaacggtgagggagaaaggggacacccgcctagccagccagatcagccaatcaaccctggcgatcaatggggtgacagatgtcacatcctcagcactaaatcttaaacagagaagtatttgtcttctttgctatgaccttgctctgtttatgtctgtacttaacagtatcttgtctacttaacgggagaccaaagtttttgcattttctcctacaactgcctcctcaaagtcaactggtgtctgaaggttggttggttcacatccctgagactacgcccatcttattttcccactgcatctaaaacatggctggaatagagctttgtttattggattaataaataaaggagatagataaacaaagtgagggaactatttagcttcagaaatgaaatcaaaagaagcgacaactgatgttcccactgttcaccctcatccttcgaaacactactaagctcccagcaagctcagtattatagtatttgcattggccagtgattttttaggaaccttctgtcacctctcaaatcaaatctatgacacatacataagtctttgttttatattaatatacatacatgttttcagcctgctaaggatgaggaaaaaaacatcttcagcaactaaaaggttcacactttctatggaacattcagaggggactctagtcacacagggaacgtggcctacaaaccatgcactgcacacaggctcttcaccctatccacttaccaaaaccatctaggagagatttttattaagttggtatgagatgggcccttgcattgcctttttcttttcctttgaggatctggccatatagcccaggctagcttcaaactcttgatccacctgcctcaacctcccaagtgctgggactacaggtgtgtgctaccatgtgcagtggcatcaatagtttaaaaagctttccaggtgcttaaaatctgtcaccatcatttgagtgccattaaggcactatatgagatcagtctcatttttcaccaaggagtaaataaaatgagcagtgacggatcagaaaggcaatcaggtcttagctcttaaagtgtggccagcccagaggacaaaacagttctccctagcacctcttacttgtcccctggctcctggtcccatcatccccaagctctattagaagacccagaatacttggctcataagagagagatgggaaatgaccatgaacacattcccggtctctgggcttcactcacaccagtgccatacctagtgctgtaggtaacaataacctgatgtgttttttaatcacatagatacaagaaaagacctccacatttggtgatcaaaaagaagaaagagaaaagtagactccttacaccagtagtaggaagtagggaaggaatcccagatagaaggagagagttagcaggtttccaggggaagaacttcagattgagacagagtcagtctgctggtgggtaagtgaaaaagttcctaacagccaccttatggcctgctgtggtgctcttatcaggtgacagaaaaatagccaaaggctgggggtgtagctcaggattagaactcttggctacctttggggaatccccgtttgatccacagcactggaggctgaagggagacgttggaaattgtcacaccaggcttctgtgctgctggggatggtcacagcagggtgtgaacctgtcaatctatgtggctcctgcaggaactgtatattcaatgtgtatgtgcctgagaaaaggtaactcaacttcccaaagattaatcatactatctggccatgagcaatattcacttcaggctgaaaaaaaatgtcactttttcaccctgccctgtctgatttgtccaatcagaggtagcaaggctaggtctggtgaattagaaaagtagctaacagccatcctttgtgctcagcctctctcttttcccctagagctctcttcacagctgtagcttccccatatccagagggcccaagctcagctagtgtcaccagctttgtcctccactccagcctgcggctttgctccctgcggcaacccaggatcttcttgtttttttttcttttcttttcttttctttttttttttatgtctctgttcttcctctatattgttttgctcccaaactgaagcccatttcccttccatttctacctaggtcctgtgccctgccctttaaccccaaagttcaatgaccatgatatggttcttgaaaggtccttctcagcttcctggtttctggttaccactctgatttaccacctccaacattctgagatgctcttccaaggtcatgggcaaaagggtagtgccctgctcaaccttttctcacccgagtcagatcccggccttgtctattaactaattctacacacacacacacacacacacacacacacacacacacacacacacacacacggaaagcattgaattttggctgtgttggggcagaaattctatttagtatcatttatataaactacttattattcatggctgacttccacatcatacaacgacagtgtagggatcaagagtgccagctgcctttcgtttcaaaaccaaactctattcaggtatgttcagtcttaaaaggatgctcatctgtggcatggctgtttgctttcaaaccagggtgaggatcgttaaaagagaatgttgatttacacacaggagccagaaagaggtctggatcttctccatcctttgtgatagacaagccttgtatctttactcctcttggacaagcttcctctctccttcgcaggatggaaagcacagagtaccagcactctattattttttcctactgaacatcagtttccttcctcctttactgtatgaagcacacagaagtccaaaatacaaagacaggtgtggaagaggagctgcctaagggtgcccctgaagttctctcccagaaacctagggttttcaggctcttccttaacccatgactttataagaatggggcgtggctagcattctcactgtgtgtgtgtgtgtgtgtgtgtgtgtgtgtgtgtgtgtgtgtgtgtgaacaacacccacatgacaggaggtagcatccccagagcatgcccagtatacctacaggttaacactaggaccccaacaaaaacaagtggagacaaacatttcattccttaatttcagaccacagtggttaagatgtgtacttgggcttctgtcaagttcaaaaaggctcagtctaagggattttatttcaaaacaacctctccagagtgttgttgagaattcaatgaattgacttcagtttgcctcaatttcagaggcagttttgaaaccagtggttcctcccagctctaaaatactaagccatttgtcctaatgacacagcagactctggactccggagtaccacaggaatatcacaccactgcaaattactaggggtgctgagtcttcaaaaaacgggaagtgaaacaaaagcactgcactgtttctgggatgaaggcttgatatggacaagccaaattgtttggggggatgagtttttctggtggcagaatgattctgcccagttacacggccccaagttttcttttttgtacctatctccaaataaacacatggcccatgtagtgggctcttttctctttctctaaagcttccaaagaaattgtttgtttgtttgtttttttatgtcatggccaagtgcagaaccagtcaactttacaaaaggagtcatttaatgctcaatttccccaactttcctatgtcaaaaacttttacccttcaacggcgttattgtaccataggttgttttcattctctcccacacaacgaatgtttaaatcgtctctgctggctcctctttttttttttttttcccaagatgacttttctttatagcctaaactattttcaagccgaggccctctgacctttttacaacaaacttcttgcgtgtgacacaccaaatgctggtctgaaagccaagaggaggttaagggtctgggggtggggtgggcagagttgggagaggtactatatttttggcgtcaactcagaaatacagaaaatgtttgtgcaaccactcccccagccaggaaccccctcccacactgcctcctaccacattaataaaaaaggatgtgagctagtgaaacccgacagtacaggagggacatttaagatgggcacaatggcacatccagagaaacctactgatgacggctccacaagtcagtcacaccctccccctgtccccaatctttcctttccaacacccaaagtttaagatcagagcctcacgggggcgggggtcaatctcaggaatggcgggttaccgccacagctacaccaccactcatcaaccactcctatgacacgttggaaggacaggcacagctcctgaacgcccgggtggccgggttgtgtttaagaatcgtactttttttttttttttttttttttttttttttttttttttaagtacagtgaacgcacgagcctggaagacattaacttgtgaactgcatccaacacaccccaagagaatccatagctcttaaacaaaaagggggagggggtacattaccatcctgtcccgagctttccagatactctgtcaggtcacatccaaacgcactagcggctccctttcgtttcagcttctgcttggcacccttgttcttcatgagttagtcccacagaggctgcccctccgtctcctctctctgctccgcaccgctgacgagggtttcggggtcgggtcaccggggcagagcggttccgcgggtcggcatgggcgcgcagatcgggccgtgcaccgccccgggcgggtgtcacctccctactcgggctcccgcggtgtttcccggctcttctccgctgagccttgcgaggagcaggggccggggcgcggcggcgaggggaccgccccggggctctgagtgtgctccgccctaggcccgcgctctgccttcagaccgctgggggaccgcgaacagagagcatcccgtcccctcgcccgccctcgcgccgtcccttttttcctgtcttacaaatcccaggatcgtccagctcaggaagcgctggaaggaagtcagctcgggaggggggcggaggttggaaatttttggcagctctgagtgtgtgtgagtgtgtgtgagtgtgtgtgtgtgtgtgtgtgtgtgtgtgtgtgtgtgtgtgtgtgtgtgtgtgtgtgtgtgtgtgtgtgtgcagtcgaaggaagtaagtgggtgggttgagccacgcgggctgggggagagatagtgctcgaccgaggccggtctgcgagtccagagatcgctcagggccgcccgaaggaaatcgtcctctcgaggacccgcggccactcgcccgcttcctgccgccagcccggctccgcacagcgcaggaggcggtacccagctctgctgggagggcgcgggatgggtgctcacgaagttgtcctccttgtcatcccagtcctgagactttctatttcagtgcctgcctttctcctcctcagacacaagtatagtgacattaacaaagactgggattccagaaacctgaccagcagagccttttcgttggccactcccatctctctcggagccagggtctgaggtccctgaagcccagacgtctcctctcccacgctgaggttaggataccctccggctagagaggtgcaactttgtaaccactgcccaggaagttatatttctagttataaattcaagttcagacacacacagacacacacacacacacacacacacacacacacacacacacacacattatatttctagttacaaattcaagttcacacacattatatttctagtaacaaattcaagtacacacacacacacacacacacacacacacacacacacacacacacacgccaaccttgctaaatgcaagagatttgagcggaaaacccaggatttaagggggcctctgtcattttgccatcatgcagagagaagtcttccaggttgttttaaaacttgaagtgcgtactttgaggagggcatgtttttccttcgcttagttggaattcctggacttctgtgtactcaacacacactgaacactcaaagtcttgtgccttaacaatatgaagattagattaaacttcctgtatacatgcaaatccatatataggcttgaagggtagggatattcataaagatggcaaaagcattatagtaacattttagttatggattccctttaaagtcacttacatttcatcatgatgatttatgaactttgaactctgatcttttcctatgttgggacataacctgatagccagcctaccaaatctggcctacagatgtgtgtgtgtgtgtgtgtgtgtgtgtgtgtgtgtgtgttaggaacttgtcatgtttttaaaatattagtagctaatattataaggtgcttctccatgagaaatgtggatttctgtcgtctcctataaaatggaagctctggttttaccacaagttgttctcacatagcaaagactgtggatgctaagacacaacagcacctattagagatggcccttctagtttgtagtttcctctgcttgtcttccagcctggtctctggagctacttgagtttgtgcccagtactcaggctctccttatttccatatcccatttctctcaatgacaccagccctggctcagtcctcctgatgagacatcctcaagtaaccactgactcattgttctctctcctcctccttccaagctagtccagcccccaaagcatgagtccttcacaatgcctcccggttggggttctccatagtcaggcctccttggtagccatcacatactcctcagtcgttagaatacccaccccaccttttctgcatccaagctcctctcacctcacccatcccacgtattagaagcctgatgggttctcctaagcgctgctgttgttcgtacacttgcttgctcaaaatctatcaatgactctgtttctaacagccagagcagtaatccccaagcatcctgtaagctgtttggattatttaacataatggcttatttctccttttatatctagagaagcatctctttgtggaactgttaacctttgcttagtgcttcagcaaagactttcggtgtcttatttttttcccctctcttcttccttactttaagtagattcttttgtaggaccataactataactgtgtggtgtgtgtgtgtgtgtgtgtgtgtatgtgtgtgtgtgtgtgtgtgatcagatttggatcccaaagggttcttccgttgtactgcggatttcctaggattcgaggttatatggtgatagggtaggaatgttcaccgaaggaataagtaaactatctggtgataagttatgaatttactggaaaagtatttttgcttactaagacccagcactaaaaagtcctgtggttgcttacgactaccttacttgtacctactaaggactaatgactacccaaatcttccccaccgttagtaaatagaagctggacaaccagtatcaataggttttagtatcacctatggttacaacctcttctttacctagtttgcccataaatctagatttaatatcagcaacttcatcattcatctccctctccaggtagccaactaaatgctctcataagactcctcggccatgatctgaattccatgttctcagatgctggctgttagcttgttctctagccagatgcatttcttccctacttcctccttttcctgcctccagcagtccctgttttaaaggtgcttggatggtatctgggggtgagatcaactgctagggaagctctttgtgacaatgtcttgtgtcttacctaaccctctgtgctccagggctctgaggccaacaaaggacagaggatgaccagggtaaatgacttcagcaagctggcacccccggctccgtcattgcacttcttgtgcatggtacctcagttaatgttacattgcaaatggctgcctctgaagttccaggtgaggtggaccaagctttgtgagagggcatgcaaactgatggagccacaccaccagtcactaacaaaacacaagtgaagaacttcacttcttgagagaaaaggaacaagaaactggaatgaattcttcatcctgaccagtctgtccctcagtgctctgccatctccatgactatggaaagccagtgttgcttctaacaggacttccaggagtgagcttaagcagtgttaagaatgagcgagaagcgatttcaaagggcctcccccatctcagatatggcatgaagtaatttgtctgtttgtctgcctgcttcttttggaaagttacgtcactcagagggagagctacacacatcactttgctctcccatctgaaaaagtaagtaactaggaatttaaggtgaggaagggtggaagggaagagaaatgttagaaaaagattaggtcataaatgccccacccccaccagccttaaaatgtctagaggtaagaaggtagagtcaaaggccaaaccaagttcctaagagctgggcactggtaagggtaactcagcctacttctttgcacatcaaggaccacactggaactttcaggaaaaaatattctttgatggcataaacagtaggatagagtagaaactgacaggatggaggatgagttatctacatataatttaaagtaagttaaagtaaatatttaaagtaaattaaaatttcctcaacagtgctttagtcactctctagtatctttacattgaataatgtcactttttttttttttttaaatctaagtggtctggagattttctgtgtttccctgaaagttaaaaaacaaaaaccaaaaaaaccattgcgacatttgatccgtatgcacagtttgccattaaatgagtctttagcattttggaagccatgagtgagcacaaaactcacttgtcccactcaacatgggcccggatgctgccaaagagcagcaggacacttccttcctaatccagtactgagaagagacttcaaggccacaacgagagccaaatgtccctgctgaattgctattatgcccacatctgaacctacataacccacatctgaacttgcacagggcctagccttaggctccgagtctgagtttggatccatttgtcttgaggcctttgatcagcagcccagagagaaaaatgactgggctgttgttctttatgagtggccccagaagcttgccaggtctgtcttgagcgtctggaggtgttttctgatcactcccagtagctacagcttgagatcatttcttttgctatgtcttcgacttttcaaactgaactttgggtaggaaaaacactcttcattgacaagggggagttctcaggataaaaaccatcttgcctctttgacttatttctgtaattctggtttggttctgttgcttccttcagcctctatttcctccctcactggattctgcaccctttgggcacgatgcctttttatttttatttttttctgatttggaaaaagaaaactatagaaggatcagagccgggctccgagccccatctgtctccctccagggtccttctacactggagcaagcgattttcttaggtgggtggggatgtgtctccgccccgttcattgtgttccacagtttcctgtactctgcctgtaaccctttaccaatctgccaggcgcctcttaacacaaaagaaaggcgagggggcagggactgctgaggaaaaacatccctataaatagcctcttgaacgaaattgttttcctcacatagagttgttgttaggccttgacgccccctagtcttcctttacactctcctccccttccactccagccttcctctccatgcttgcttttcttcctcaggcctgctgagagatgcaggtgtaattgggggcttgatgggagctgcatctctccagcccaggttgctgctcccagctacaggtagaggctgccagcaaaggtggacctgggtcctaggtcctaggtcaggtagtttttgccctaggatctccgttgggcaaattttctaaccttgctgacctcagggacctcatcttaatgagggtgatggtaacaccttgtagggttgctatgccgatttaaaaagatagtggaaaggcctgatgattaatctggacctacattggtcctgcatacactaatgagtattttgtttgtttgttttctttacacagcatgaactttctttttcttgcagctcatctagtgtttgtggtgtgtccgcccccacccccatttggcatcctggtttcctatcccatatgaactggtgtgcaagccttcagcttgcttaaacttcatttatttattattcctccctcagttccaacacaagttcagataatctactttacattcaagtggctagaacctagtggaattttcaaaagggaaagatagtcccttcctgtagcagttcccccaacatgaaggggacagtgccttgtaggtactttaggagtggggttttggtcacgactcactctcttctcctgtctcctggatcccaggatatgctttcattcctactttgggcacatagcatatagaagctagtatgaaaataagaggtgagacagtcacagaagcaaattaccttctctgtataaccatgctccccaactgtgaacattttcagttgggatgatatattcctgatgtttctctttatgcctcttggagatatatatgtactgcatcttcaacaggtagtacacaaacattgaactcttcatactgatcctaaacaaagccagtcaaatatgcacagtttgatgcactgtgacatttttcaaagatgtgtgtgtgtgtgtgtgtgtgtgtgtgtgtgtgtgtgtgtgtgtgtgtacccacatgtctgtattcatatgtctgtgtctccatgtattgcattcatttggtttcatggaagtcctccctaattccactggacctaataatttaaaagatccacaggtttaggctctaatcttacttattaagcagaacttctataatttagaatcttatggatattttaaaattatttctgaggtaagatgccccacagtcccaattgcacaattctgatccctcttcaaaccagagggtgtattctgctttttcctttagaaaatgcagctagtgttaggttgaattttgtcctccccaaattgctgaaatcctagtaatgtaagatatgactttctttggaatagaatggtcatgatgtaattagctaagactcagttacctggatcagggtaggtctctgaccctgggtattcttgtaaaaggaggtagtttgtatacagaccctgacacaacaaggatgctacatagagatgaagacaattagaatgatgctccagcaaggcaaatatggtggtttgactaagagtggcccccacaggctcatgtgtttgagtgcttggttaccaaggagaccaaggagtggcactatttgagaaggattagaagaattaggggtgtgaacttattggaagagtgccacttggggtgcacgttgaggctcaaaagcccacagtaggcccagtgttgttctctctctttctctctgactgtgtatatcaggttgtaactctcaactacttctccagtgtctgctgccatgctccctgccatgatggtcatggaccaagcttctgaaactgtaagtgagccccaatcaaagctttcttttataagaattgctgtggtcatggtgtctcttcactaaaacagtgactaagacagcaaggaacattgaagattgccagaaggccaccagaaacatgggaagagtatgaaacatacttatttcacagtgctcagcaggaactcttacaaaaggcaccttaatcttagatttctagaatctggaatggtgaaacaacacagttttggtgtttaaatccaatttgtagtacttcattatggaagcccaactaatctaataattaaggaagagaactaaccccagtcctgcaccagaagttgctaacctaatgacgaaattggaaacagtctaagttgtcttcggaatctctcctggtggaatcttcagacagtatctatagctccagctgggagggaagctaaacaaccaaccgaatacaaacacacatcagcaaggagctgcagggcagcaggatgactgctgtaaaagtagagagagatccctgtggtttagaggctggtggaatggaggaagtggagacgtaaaactacagtgtcaaactttatacacagtgtattttttcgtacatgtatacttattctcaaattcaatttatacgttagcaacagtaagataataacaacggaagcatactagaatagaacatttttgttataataacattccacattcccatctagtatttttagacttcagtaactccaggtaatggcaatcgaggaagctattacattttgaaggacaccaaaatttattgcttgggtaccggagaaagggaagctctgtggagccaccctaagagcccagtgcctccccagtgtctccccactccctgagttaccataggctctttcttccatgagaaatttggtgattctatcccagggcccaaacactgacatttttgactgtgtatgaaatctatttacatttcagcatttattcactgattgggctggcctgtcaatacacttacagactgatgatttacatataaaatgttccatatatgttatggtttatgtataaaatgttcccaaaggcttacagattaaagatttctccccagctggtgacactattgagagacgattggatcaagaggtttctaatttcaccaatagattaatccactgatgagttcgagtgattaggtggtgagacctacttaggagaagattaatagaggcatacctttgaaagtcaaccgattcccagaatttaacctctctaccccgtcaacttggttgcaatgacgtgtgcatctttactttatctgtacccttccaccatgatgtttttgccttaccacagcataaaatcactggagaaaactgaccgttacctaaagcctctatagttggggtaggggcaaaccttgctttaagacgactttttcaggtattctgtcatagccacgaaacactgacaaacacaacagaatgctttctgtctatctcacattgggattgatgtgggggatgcaaagattcgggaagacatcattcttactcttggggaatactcattctagtggcacatgtgaggtaagggcatgatggaagtcagagtgccttgtagatactattttcaggacagcaaggtaacttttctaaaaatgcactcagaggtgtaggggaccaggatttgttcatgacaatatagggtttgggaaagggggctggcaaatctgacttgtgctgaggcagtgtctagataggatgggtagtgtgttatagatttgagtccagaccggatcctacaggatcagataaccctgggtggtggggagaaggcaggaagctacaggggaggtagcacatctcccttgtagctccttccctcatgccttagtgagaggggaagtgcaccctgccttagtgtctcagcccaggagtgaggctacttagagttctatctttgtcttgtcacttactttagtctaacaattagttaagcctaggtatgctaaccctaacactatccacaaccctaacttggtcaattcccttatctatattaaggctgtcagtttacatggatgatgagtaacagtagactcaaggagtggtgacgttgtgggtttatcctgaattcctagaagttatccgtaacagtaccatcacaacatttatttccatagtcttaaactatatacaatattttggcctttcaggaattgggtttgggttattaaaatcccccagactttcagaaggagaatcccagtcaacatcagcatttgagatgtgggtttgccatctagtgggcatctttgaagatgtatgcgttataaatacaagtgtaacatgcacctgtgtacacagacaggcatgtatgcaccctcccctccagggttttgatgaaattatttatctatttctctaatccttaatgcttaaactccaagcaggattttggacacaaccttattggcaaaagcgtctcgtgtctcagtttatgtgcgatggtcagggtagaggaaggctttatactgtgtgtgtttgcacatatagttgagtatccaggttccatgggggctcatttgagctttcagtacttctccatgtctacttttcatgctccacttgcgaattactgagccagaacagaacactgagggacacgtcacaggctgtgcctgcccacagcagatgctcagtaaacattcatttccttcctttccactcacgcccactttcatgaaggctgtattccaaatgacagtttcaatgtgcatttggtgtgtgagacattgctatgtctgacgcagagttatggtaggagggatttgcttttgtgaacacagagatgaatgaacctatggacctgaaaacaagagttttgcaagagattccagaaggttaggtctcagacatttggggtagattttctgcagtttcaagctagactttccttggaaagaatatcacacccatgcttgttttctccagcaaggcgtgtactagtggcaagggaagaatgaacacaaggaggagtgtgatcagttcccaggtggtgtgagatacccagtgaaggttggaaaggcgattttaagaggttttgttttgttttatgaagggaagccccctttgatgttctcgtggcacgaaggtggagatttaaattccctttctgttatttttggatgtgggttagagtttctttggaaaacaacatcatgtggagacaggctgtgcagtggctgagtttggtggaaaacatacatgtacagaccataaaactttaaaaataggcatattatgctttgctcatgtgtcttaaatctgaaattaaacatcagcaagatgataaagcagaacacggaatgtttattttaaaagtaatatatatgtttggctgaaggagaggcaagttttctcattgagagcctgttttcagttccttaggtgattagtactgtgattgcaatgtttgtggtgatgtcacagtttcctactggcgtaacctgattcagtgtctgctaactccctgctgtgactgatgagaaatacagtcattgctgatgcctttccatttcctgttcccctcctgtatttttcttattttgtttcccccttcatttttggtcgtgattgtatatttatttctttatcttttttgacagggtctcacaaatgtatctccaactgatctgaaatttgctatgtagaccagactggccttgaactcacagagatccacctacttctcaagtgctgggattaaaggtatgcatcaatattagtggaggccacatcaacactgttgctataaagaatacctacatataaaggaaagatgtttactttaggttatggtggggaatctaagatctagggttcggggttattgagagtagaatatttaatctctggctataactgcacatatcttacaagtcattttcttttgtgtttttttcctgcatatgcatcaaggatctgttatttggtttattaatgtttaggatttttttttcctttaagaactgacctatcctttactggtatagaatgacctcctttatcctattaatagctaattaattgaggtattttgcttgattttgaaaacaaaacaaaacaaaactggcctctcgtttttcattttctttcattgtgcgtgtctgtgtgtatataggtctctctctctctctctctctctctctctctctctctctctccctacttctgtccctccttccttcacctcactatcctctgatctggcagttgattccaaggacttgtgcatgctaagcacatactctactgttgaactatagtccctgtttcatttcgaaaacttttaattacattttatttatttgtattgggtgatggtggtggtggcagtgtgttgagggaaggggcatagaatgtctgtagaagccagagggcaacttgcagaagtcagttcttttcttcttccatgtggattccgggaattgaacccagattttcagacatatgctgtgtcatcttgctgctcctttgtttttcttttctttttttatattagtggtttctcttttcccattaaaaaacttttcatttgatgctataccaactttatagttacatttaaagtatgctttcaggcagtgttgaagacagagtttctgttctgcctgttatagtaggtatagtgtatagtagacctcctggaaccgcctcctcagcttcccactcactttcaacttcatgtccttccccttctctctctctctctctctctctctctctctctctctctctctctctctctctctctcgacagggtctcactatgtaactttggctgtcctggaactcactatatagaccaaattggcctcgaactcccagagatctgcctgcctctgcctcttgggtgctgggattaagggcatgcattaccacacccagatgctcttctctctctgtttttctctcaacccaagtccaatttgtacagaccatacactccagggtctatctatgacagcatggtcaactgtgcacaaggccacacccttaagtaagaccgtctctccatcccctagaggccatcaagagttaatagtttcttggttagtggtggaagctcatggacaagcctgtccatgttatgtcaactgtcttgatcttgggtaggctttgtgtagataaccacaactcttgtaagttcacgagtgcagaggtcctgtcatgtccagaagatacagttttgctcttgtcccccaaaccttttggctcttacagtctttctgctccctcttcatcaatgatcccaagccttgggagtaaattcatgatgcagggtcccattactctccgcacttggattgtgaaagatagtttctattcaaatacatttccaatgtatctgtgtacaaagaatgtaaagaaaggtctggctgggactggttttgggttcattcataattaagcaaaattgtgtcctcaagtgaacatttagggagacaaccctacttaccatcttatacctatacatacttgggcatgcatacgattaaaattagatgcattatgggaaggacacataccagagaaaaatgattacataaggttataaattagtagagagaaccactcttactatatccatagtaactaaagtcacccttttaatgaacgccacaaaagcaagccccaaacagtaacagacacccttcagtatcttgatttgtgtggccactgctctcttgcagtgtcttctgatcttttctattattttgctttaaataacagttctttgctacttttgcaaatctgtgtgggctttgatttcaattctttgaataaaaggccaagaacttggaaattcctgatcctgatccaaccactggtagccattttgtcactgtagtggctacccaaaagcttatattattatctatcgttttgtatctgaaaatattatacagagatagtatgggaattttgctatatattatgtagcatgacagccttacaataggggctgaaaagatggtttagcttattttaaaagcctttgatgctcttgcagaagactcaggttctgttcctatcactcaggagatggctcacaaccatttgtaagtcacaaccatttccaaatcggatgccctctcctgacctctgcaggcaccaagaatgcctttggagcacatatacacatgtattttcgtacacagagaatgcaatttaaaaaagaacatagtaaaagtacacttttaattctcccctctgacctattattatcatacagactacctttctataagtctattagtcttaaaaaaaagtcttgacctcccccccccttgagatagggactgatagagccaggttggcctctaatttcccatgtagttttggattattttgaactccagatcctcctgtctctagctcccaacttctaatgttacaggcatgtgacaccatacatagcttgtgtttcctgagacagtctttgaggccagggcttgcttcaaagttacatccatcttgctgctcccagcgttggaaatacagacgcaagccattacacctagctgtcataacccctgtctctgttaatcctaatatcaattccagttctagatcaccttcagttgctcattctggtcagtggttgcttgctgcctctttgtgaacctgaccattttggatgtcaggtattatgaattttaccctgttgggtgttgagtatatttacatttctacaaatgtccttgattcattggttacaatttgctcttttagagtcttgttaggcaggtctggagcagtgcgtagggtaggttaattttctaccaaggcaggcaagacttctttgtttttcttttctggtaatggaaaccgacactatttccagcccaatgcaaaggcaggcaagacttctttgtgtgttctgcccagtgtcctgtggatgatacagttttctcctgtggtaatggaaacccacactatttccagtccaatgcaaaggacaagaactgttttctctaatcctcgataactcttgttttcttttccctcccatccttaactgcccctccccaaaacaacattctgtcacagaaaaaatcccactgtgggtaacaacctctgtcttagtctgcttcccattgctgtaacaaaacactgaccaaaagcaacttgtggagggaagggattatttcagtttacagttgcaatccatcataaagggaagtcaagtcagggactgaagcaaagccatggaaaagcactgttttctggcttgttccacctgctttcttatacagtgcctgcctagggcatcctccccagtgagctgggccctcccacattaattaagaaagaaaaggcaccacaagctaacctgatacaggcatttcatcagttgcggttctgtcttctcagatgactctagcttttgtcaagttaacaaaaatctacaggacactatactcctttggcgtgataaaagcctaattcatggatctctaaatgttcaaagtccattaaattcaatttgttaaaagcttttcttttaacatctctttgtgggggtggctaaatctatggtgtattgctttgctgtcgttcacatgtggcccctttgctgggtgatgttcctagtttgttttccattgttgtgataaacactatgaccaaaagtaaccaggggaaggcaggtttttatttactcttatatgttacagtctacttttgagggaaccctgtttgctgacttgctcactttactttcttatataacccaggactacctgcccagggcctgcaccacttattgtgtggtggccagtgcataccaactagtaattgggaaaatgaattcacagacatacccataggctggtctgatggagataattctcaatttaagttccctctgtccagatgactctcatttatgtcaagctgacaaaaactaactggtataatgattttaaactcaaggtgtgcctgtgtggaggggatggacgtggtgatggtggtgtgtagtttgcctcaggaagaccaagccttggctccggtcttcagtaatacgaaataagtaaatatataagtaaatgaaaaataaaaaaaaatatttacttgtacccatgggaccaaatggagaccagtcctgtacagggagtttccattgcttcttcccagagcctagttagtagtcctgggacctccccaggtctcttcagaagcttctgcctaatggcaggaggctcaggctccagatttcactaccataccacagtgatgtctaggacatgtggcatcagaatggtcttagatttctttaaagcctcagggctgcttcacagtttgtatagggaaaaaggaccagccaaagaaaaacactctgagcagagtcaaagaaacacactttggaccttcgaccagatccaaagaaatgcaccctgaccctgaaaccaatgcctaagacacacactttggccctgaaaccagagccaaatctgaccctaaacctgtgccgaaaactaaccaatccctgaggagatctagccagcctgagtgcagggattgaaatctgaccaatccccaccctggaaatctccctggaaaaactctgtccctatataaaccctgttcctgtctgcttttggctgttgggctgcctggatgtattcagccaccctggcagagggcagccactctcctggattcttctctcccaataaatctcttgaatgaagtttgggtaaggctttccttccggggaatggaggggaggagagaaacaacttttcacaggagccagagcagagaggagcagggcagggctgtaacacttttgcagagaaacctttccctagggaagctgaattgttacactaccctgggagactggaaccgaactgtgacaacttcgcctggggaaaccctctcttgtctgagcagagctgatacactggggaagcctttccctgaagctgggctgtaagcggccatgtttactgtgacccatgctagaatgcctttctatctgagctgtaacattcagtattctgtgactcccgagtgccagaatccctgtccatcccatctgccttacagtttgctccttgagagcagtggtcctcagcctttctaatgctgcgtgggaccctttgctaattttatgaacccccagtcataaaattatttcattgctacttcctaactgtaatgtcgcactgttatcaatcataacataaatatctggtatgctgcctctgtgaaaggttccccacccgtaggttgagaatcattgctttagtgtgcgccggatggggtggttttcatataacttctgcgacagagccggtagcatgtagtctgttgtcctatgtgcctaagcagagcccaccattgtttttaatctctctctctctctctctctctctctctctctctctctctctctctctctctgtctgtctctctctgtctctctctgtgtctctctctctctgtctctctctctctctctctctctccctccctccctccctccctcccttcctgttctttctttcttttgcaaaaacatcattctgtcttcaatttggtacaaagcatggctgagaaggctgcaacctgtcaggactttagagttgcttaagtgtaccatctcttggcccagatagtaatgaattcagcctaacacaaaattgtaaacttacttaaaacattgtgaaggctgaagggtttgtttctgtttttatttttggtatgcgatttcagggttctcgggcgtgaactttgtagatgacaatgtcgcctgataatgtaacgcaaaataaacacggaactgcagacctctggtttctaggatgtggcccaaggccactcttcactcagtgttgcccagagaagcaaaaggcttgcacattcctgcgagtctaaagcgtcatgttactactctgtaaagctgaaggtttcgatctcttttccaggttccggtgacgaccctggggatggaatctgagaagcgccaggggcctagttcgctaacctcagaaaggtttgtgaccccgctaaggttgtattgtggaccccgtctttttctcaaggccctgcagttcgttgtgctgctggcctggccggccggtggcgccaagtccctggagaagcgagcaggcccgccctgcgatggcattgcgtgcgaggcggagccggggctgtagagccgcctctcggcggcgcagtccacgagggacatccccgggactgctcctcaccacctccccttccccgggcggcctcacagtggccgcgtccggggtgagtacgcgggacccgagttccgtggctgcgcgctccgagcggtcatcgccgggctacgagcctggtgggtccaccggatggggccgggcgggcgcggagtctgcgcggtcaggcctcggtgcggctgtcccgcctggcaagcggccggcgggctgggggcctgcagaggcccacctccgccggcctccggctccggctccggctcgggtgcgggctccccagggcgcagggcgggagagatgctgggctcagcggggagatgcagggtacatccgcagcgtcccatgtcccggtgctgacatccccaggctcctccagatggaaaaggcccatcctcgtgggtccgggtcagacagggtttcacctggggagagggctcagctgagttgtacttcccgggcctgcgagggccgggcgagcactgagtggcctcagcaggaggtagttaacaggggatttgaaggacttcagacacacctgctgtaagtccggcggcacctgatcgatccctctacggtctgtggatccctgtctcttgatgttctggcttttctaagataaaggtgattaattcttagtttggggttcatggcgagggtgataagtacccagcgaaggcctttggggcggtaattaggactctgagggcgcctgtggttgctaagtgtagggaggtgggcaaggcatgaggacgaggaagctgcctgactcctcactggtttggtgatgaaagagcagaaagaaggtaatttgagagttgagaaaaggcctctctgtctcattttaaaaacaattagctggtgtgtgtgtaaacagttttctctggatgttagaaactcaaggaatctcagatatggttcaggttaagcaagtggaattcaagctagggtgtggaaggctattccaacaccctgccagagagttctgcaacgtgtctccaggaaaggagacaatgcttgcttggttggttttcttttcttcccttttaaaagttagttttaaagaacaggtttgggctttgtggacactgaaaactccaggagacagcacaaacgtttgtgtacctggttacaatagagcgagatccagttttgagggttaaaaacatctcaaacaggtttgctgaccctgcggaactgtttgaggaagaataggtagggaggcattttatgtgccacttgatcaggctaggtataatgtgtgctttatccagagatgagtgcaaatgtctccttgagacgtttatctacagtggggacatcaaagtaagtcagccctgacttggaactcacaagtacagtccagattggcttgggacttgaggggggacaatcctcttgcttccatcttctcagtgctcatagtataatcatgaaccgcaggtgactcctgactattatgttttttttttctttctttttctttcctttaaccaatagtggacaatggtatgtgtcagaattacccaggttcctgtttaaaatataaatttcttggctccaccccaaaccattgtaacaaaacttttgggtgtggacccaggaataggtattttaagaagagtacatggcgtacgggtctctggccagtgttgaagttcactgacagcccccccttctctctctctctctctctctctctctctctctctctctctctctctctctctgtgtgtgtgtgtgtgtgtgtgtagataggggtttgtaaggcatatttagaacaggtcctcttaatatttacacaatcaagttgccaccaactttatgtaactgaatgttactgttcctgtctataatggtgtcattttaaacttttaaaatattttaatggaaactgggcgttggtggtccacgcctttaatcccagcacttgggaggcagaggcaggtgaatctcttgtgagtttgaggccagcctggtctccaaagcgagtgccaggatagggtccaaagctacacagagaaaccctgtcttgaaaaagaatattttaatggacagttagttattttttaccagaaagcaatggcattgtttcctgtaatgagccatcccacccctgaattagaaacacaactttttcaaatttgtctcagtgaccatttctgcgattttatacaggtagaagaagtcatgcacacacacatatattgcataatcgggattgtgttttagagacgttttatgtttttttttttcctacttggctatggtgagctcttcagccatagttaggatcttttaaacatccattttggggtgtgtatgcttatgtgcacctccttatgaggaggccaacgacagccacttgttttactggggttaaaatccagtgtcaccatgcctggctcttttgggtgaattctatggatcagtatcaggttcttgtatggtaagcactttacagactctctctccagtcactatctctctttctttttttgtttttagttttgaattttgagacaaggtttctctgtagatttggagcttgtcctggaactcactctatagaccacactggcctttaacccacagagatccacctgcctctgcctcttgagtgctgggatcaaaggcgtgcgttaccaccatgtctctcttcagtctcctattcacccttttaataaaagcatatgctctaggatgtactatatcgattaaatcagattcctgttatttttgggttcctttcaaggttttgttgttttagcaatgttgatgtcaatatcacagtctcctctgatcatacactaaatgatagaatcaagagttttatatatagcaaaatgcactttaaaatcccattttgtttcttcttcttcttcttcttttcttcttcttcttcttcttcttcttcttcttcttcttcttcttcttcttcttcttcttcttctttgtttttttgagacagggtttctctgtgtagctttggagcctatcctggcacttgctctggagaccaggctggcctcaaactcacagatatccgcctgcctctgccttccaagtgctgtgagtaaaggcgtacctcaccaatgcctggcttgtttgtatcttcttactgctattcctcaccagaagaaaaagtgatgtgctgtccgtctctggcccattttcttttactggatccgagacttcgctgcatgtaagagtcccctcttgtttaagtttcagtccccatctcaggtgcagctgttagaatctgccagttctggagtggaatttggaaaccttccattttgtctactcctctggagagccgaccaaagcacatttggagccacagatgagaaatgcttttaaataaatggcagagagtcaggaaattcagattactcacctgtaaacattcacacgcttggtaagaagttgaactttgagacaccagaggcctgctttttttttttcccacactatctcagagaatctcagctcttagggccacaggtagacctgacctgtaatgacagcagaaggtggacttctttttttttcaaacttattcttctttcatacattacatcctctctgaagtttcccctctctccactccttcctgtcctctctccactccttcctgtccctccctatctcccttcttccccagatcaactcctcctgtttctcttaaaaattaaactaaactgaaaaaccaaaacaaaacaggcctcccaagtatatccacccaatatggcctagcaagttacaataagtctgaacacaaaccttcatatctcagctggatattgcaacccagtaagagtagaaggaaaagggtcccaagcacaggcaaaagagtcagagacacctccttcccactcccattgttgggagtcccaatgacgccaagctacacaaccataaggtagatgcggacggcctagctcagacccagacagggtccatgtttgttgctcgtgagcccctgtgagccttgcctagttgattttgtggcccatgttctcctacaatcagaaggtggatttcttctgatcctactgcagaattctcagaaagctgaaactgatatagaaagaaatattctgtgagcttctactgaaaactaacatcagaaattcttgtgacttctgcaagcatacattacataaaacaacttcagccatttactagttcagtttacttcatatttcctgactgttttagggcaacttttgttattaaataggtattgcagagctgcaagcacgctctttaagggggtactacatccttgccccttcctctttctcttaccatttggctccaaggtaagaacttttgctttctgtgtgccacccaccatgatatgttgccccaccaccgcccagaaacaatgaagccagtcgaccacgggctgaaacacggcaaactgcgagccaaaatatctcttttctaagctgattatctcaagaatgtgcactatctgacaggaagctaagatgagctcacacaatacaccttgggttcacagaaggggtgggctgagtggcagcccctcccttttgaatagtcagtggtggaggagaggaagtggtgggcgtgacccagagctgttttagaaccgaaaagtgaagggtgctaaggtgagctctttcaactgttaaacttctcctaagatgatactttttatccctttagtcccttttgttccctgttaatctttattttccattctttctctttttttctccctccctctgcacatgcgtgtaggtcagaggacaacttgtgggagtgggttcaatccttctaccatgggagttctagagatcaaattcagcttagtaatcttggtgacaggtaccctcacctggcaggccatcttgctgactcctacatggtaatggttgtaataatttctgtcccattcttatgtcaaaggtgctgtaggagtcaggacaatggtcatccaggagctcactaggaagctgtaattgagacctaaggaaagtgggaaaatatgtataattgccagtccctgggagctctggtgggacaccagccaccagcttttcctctgctgccccagggagtcttaagcagcaggaccaagtgcccagggccacatgcccatggccatgtgcccactcactcacataccctatctgtggcacatgtggatagccttggaggtattgagactctgactttagtgttcaccagctgccaaatgccaccacatcctttctgtctggtgcagtgagcacttagtacataaatgtgctcccaccatatctgccgtggagacatggagatggtgtatcactaagagacccccccaagaatggatgtttgtgccatgtcgctactggttatagcttgtctaccttattagattgtttttattattatggaaagtttaaaaagcacaggagtcgaaagacaatgggcccccaggttaatatcactcgctcatctcagcgtctaaccaatcttgtttcatgtattactcttctctagagagaggaggggcaagcatacttgaaaaccagattgcagacatttagggtctgggaaaaaactgaactaaataagggctgtgcttccctttctggctggtgcgtgtctaagcctgtgcttaaaagtggcaggtgctcagagtgcagttgtcgtgttgagggaagagaaaatagcaaactctagggcagatttctaggaaggaaaggtatgcgagggtgccctaaaataatgccttgatgtggcctgaatttgctttccacagattcctttgtcacttcccatatcaacatcttcattaaatacaagaatggctctgggaagagggagtctcacagttacctaaagaatagtacaaataagtccgatggcattttcccaagcaccacctgggagtcacctgccccagagataattttcttttggaaagtcatcatgtttataattgtaaacatattatatatgggtggaaattactattaaggcagcagggatatgattatgattatctcggctatatctgataatccgaggatcatggtgatagtcagacagcaaatattgtagctctggaaatatggcaggtgtttgggtgtgccttctcattaaatccttataacgtcattatgaagtgagcatgttccgtcctcccacgtttatatgagctaggaaaatgtggagagaacctgtccccaagcctctggtcactcagctgacaggcagaggaccgggtgagagatctgtgttgaacacagagaggtgtcctaacccctttgtatttttttcctcatagaaacaaggaagttttgcccttgagctttcttctgtgtcgtcagttttatggaggacccttaagctcagaaggggtaagtgactgtttttaaccgggccaggtttagtctcaagaagtgggattaggagaggaggcctagttatttattagtcatactcttctctttgagggtaaatgtcttgtctttgaacaaattccataaactgcagttcagggatattagtttatcattattcatagcgcttcagttctcacgtagagttcttaaaaagatttttaaggctggtgggatggctcagtggttacgactacctactgctcttccagaggactcacattcggttcctagcacccacactgggcagctcccagctgcctgtgactgcagctgcaggggatagataggatagtcttttctggtctttgttggcacctgcacttacatgcatatacccatatacagacatatacacagttacaaatacaaccttaaacaattatttagcacaattttagattcacggaaaaattgtatagaaggtattttcgaacctcaccccacccactgtaggatctatttatttatttatttatttatttatttatttatttatttaagtcagggtccccctgtgcattcctggctgtcctagaatttgctctgtagaccagactcgccttgaagtcacagagatctgcctgcctgtttgctaagtgctgggattaaatgtatgcatcaccaccaccacccagccagcttttaaatttctttaagtcaagcctcccacacccagtaaatgagatagcttacatgtgtattttttaaaaaaatccttcctgcttctcacactgcagtcattttatgatcataaattcctttaattcagtaagcatttccaggcagcatctccataaatagttttccgaaaagcagtgttcaaaggccagatttacaaaagatttttatgaaacgtgatcaccaatcatcacatttaagtttcctgaaatgaagttctcaagtccgcaagaggttgtctagctggcccagagtactgatggcttcttgccatctgaggggaagagaccaggcctttaggcaggcatttgaactagttccaaggagaggggtcggaaggggcagtagcgttacaggtcacaagaggcacctgcaggattcagttgtagttgtgtgtgttgggcctgcccaggcatgaaggaaagaaataaaccatcaacctgagggtgttgctgatgaacgcaggggctcacaccccagtcagttttacctttaaccaggtgtgtggttctgggcagtttaatggtctttgtgagctggattagtggggcaaggtgcctgctgacaagtctgatgtcccagtttcacccctggggcccccatgatgaaatcagagaacaccagttcccataagttggcctctaacctctgtacctctgtcccgctccataaatgaatacaactttaaaaacaaggagactaaaattcttaccttacaggaaattgtttgcctgttgtccccattttccatatgtgttgaagccatagttcacaatgtgatggtacttggagatggagcacaactatcccacccctttgggacatttaggttaaggtgaggtcataaagatacagctttcatgttgggattaagtcatataaaaagaacaagagatatgagatctggattttaatctctctgtctccgtctgtctctgtctctgtctctctctctctctctctgtgtgtgtgtgtttgtgtgtgtgtgtgtgtgtgtatacatgtaccaaggaaaagtcattggggatataaccagtacccccaacaagaggctaaccatactggaccccaatctgagatttccagaaagcctccagaagcaggagaactcaagtcacagtgttttattgtagcagccaagcagggtgaggctgtaggaatgcaatctgtgcagctgtctaagaaggggcctgtaaagaaccctaggccaccccacagacaggtctcttagtgtacacagggagctgtagttgcccatcagagagggctccagccagctctgatgaggacttcaagatgggtggcatccatacttaatgtatatgtgcagttccttttcctttcttgtcacgtaagatttaatcaggagcatgtgctcgttggtcctcagcacagtccgttagactacggaaattagccaaagtctggctttagtcctcgctgcatttctcttgataagatgtttggaatttgaggcataatgtgactttgatggttcagagaggatgtggggatgctataagctgtgccccacaggtcctcagcaagtatctagtgaatttaccagtagtggtgctggacccgaagtactctgaaaagctggggttttgttaataactaagagcatactcctcttagagatgactttgtattatcccacctcatggtattgaagcatgaaatcaggacaacttaccacgtatgagaaacaccattgataaagtggtggtccaggtggctgccagtatatctgcccactggccatcatccctggactagtctctttaatgtagcagggagagtgatggtcactatttggtggctgctttagtgtagtgatatattgttaatgatttattaaagcttgcctgaggattcagaaaagcaaagtcagtctcaagctatagagatcgggcagtggtgatacacaggtttattccagcagccagaagctaggagatggtggtacatgtctttaatcctaggactcaggattaagagatagatgggtctctctgagttcaaggccacccaagggcatacaagtttgaatcagtctaaaagagtaacagaactcaagtctttaattccagcactagaggggtataaaagatagaagcagggtcttcagtagagtagagacattagttctctagccacactgaggagaggcaacagtttgaggcttggtgaagagctcatgggcctgaggtagagataagacttaatggctggctgctttgctttcctgaacttcagcttgaagtttgaaccccagtatcagtctctgggtcttttatttatccatgctacaatttactgtgtaccacgaggctggtgagggctttatatgctagtccagccctgtaagaatgtagatgttatctaggtggatttcattctccccccccccagtctccagataaggaaggtgggggtcagtgaggtgactgggcatagatggcaatggctgctgtgtgatagaactgtggtttctgtctgcattcacatccctgatctttacttatttttctaatagattgttgacatcctctgtttgggtccccttgtgtttcttgtcccactctaccgctgttgggctctgttctgagctagcatctcactgagctcaactgggattcagtttctttttttaaattaatttattttttacattccaatcccaatttgggattgggtttctaatgtgcactgaggtctgtcatttttggataggatttctacctcaaacaacacatcctttgtgattgcctttcagtggtccctggactagaactgccgggcaatggcagacatcacctcttaagttgtcatcacgttctcagtcggactggaaaagtataattcgaaacttcttcactccagctgaagtagagatacacattactcataaaataagagacatgggctgcaacccaccctacctcctcccctacagattacgattgttgttgttttttaccctgtgcctgactgtggttggatgggtcaccagcaactactttgtggaccctattcaagtgatccccaaggcaaaggtcttcatggctagtttctacaaggtcatacctttggggaaggaagaaactctggtccatgatgcaaccatggaaaaagtagaacttggtaactgcccttctgtgtctccaaacctcagtaagtatttgctgtgtttgttttgtaagtactacaaaaaattcacagatatgcagattatctgacaggtatgcagagaagtaaaagaaaaaaaatcaggagaatacagcctagttaagtttcaccaaatgaatatcttggagtcagcatgccagttaagaagtggtatcccccaagaattttgtaagtcctatattttttttcattccatatcctgactccatatgctcacttatgttgaatatatgaatcaatatttacatcgattcttcagagcaccagagtgctcacactttcccagaaagccctctaagccttgtcttgtattggtcccctttcccagaatgcctttctgcagtccacatctgtctagtgggttcctatgtagttcatatgaaactcagcttagatctcattcctcttctaggaagggctcagggactgtccgggaaccagccccagccccagcccccagcccctgccccagccccagcccagccccaggaaatctcagctcactttgtgctccacctgttgtgttggtcacagtgtgctactcttctgtttgtgtttctttcttagagagacagtaagcaagcagtatgtagactgggtgccccttctagctgtgtagtccagccgctctcccagacaggcatctgtggctccctgtgtacactaagagaggggtctgttgggtggcctggggctcttttcaggcctgttcttagcctggtgtgggttgtagtccctctctcttagtatgcctcaggctgttgagaaaggtgacatgaacaacttgtaagcagcttgagaatttaaagcctgttcagtgtatgtgggctcttactggggtgtaaggtatggatggggaaggtatcttagttcctaagcagaattctgtctcctcccttactagtcagcatagcctttgaattcaggtcagaaaatggggattagttacttcagtctgatatctgaagcctcacccaggttttattagcatggactgtcttgagtttccagcaactggcagttgctggaaatgtctaccctggtggcattatgggagagaagttgcagagtctatgtagttgtcctcctggctagggagtcaggtggacttcagctccttcctagtaccttgtctgcaaggatctaagcatgagaggtgtagggcagaagtaggaaaagggccctgtgcaggaattggagtctatagaatgtcctcagctttgatattttaccctccttttggtggaggagttacccaatcctttctgatctctagtgaggtggctgggcagtctgcatgcctcattcagaaatggatcatagagcctgagctgactgtccaggcacacgaaatgctctcaaacacctgttgtgtgcttcgtcaccaggatgtcatcattttcttatcgttctatgtacagttcaggactaaatgagactttgactggttgagagcaatagaagctgacactcctctggtgctaacagtgcattgcatcaggtagagggtcaacccttcatctgaatcagtggtgtaatccccagagcttcacgccacagcccctctttcgacatgtgtcccgtgttgattgcaggaggccagagcaagctcatttttgagccggacctcactttggaggaagtacaggcaaaaaaccccaaagtgtctggaggccggtatcaccctgaggaatgtaaggctgtgcagcgggttgctgtcctcattccccaccgcaacagagagaagcacctgacatatctgctggaacacctgcaccccttcctgcagaggcagcaactggactatggcatctacatcatccaccaggtgagtgtggggctttccttgaccttgtactttgtggaggcagcgatatgtttgcctgtttggggtcaaaggatcctcatcaaaaggagagttttcttccatcacccttgaagagagcagaggaaattctgaccccaaatgtcgagtcatgaaccaatctccatgaaatgttactatcctaaaatgtacccctggaggaagcctgggtacctctcatattagccagcaaaagcccatccacacccctgagctctcctgcctgtcctgttccttctgggctttcggtgttgcacaatacagggttgggcttctgcctgttgctattgagtgaggctgtgcaggagagagatcttgctgagtgccagtggtacagccagccagttctgtggctttctaatcatctcggcctttaactccaccaccatttatcatgccaaacaggcgaggtttatttttcactgtcttgactcactcatttggcttgcagaagcagttagtaggaacagcatgtaaccaactgtaggctgccttggaaatgttcggctctaaggtcagtcagttaatggtaaagatgcctctatttggtattaaagtttcttaaaagaaaaatggggcatcagtttgaacattggtgtggtaagcttttacttgccctgggccatttaaataataccccctcagatccttataaactctaataagagtgtgggcaaagtaattaactgcttccttaatagcagatgtagctgataataccaatttggggtagaattgacagctcatgggttctcctgtgtagtgtatactttatgagagacttgataatcagcgggtttatctagtacatctgtgtctgatttttaggacttgaaataaaactttagagtttttaaagatttatttttattacacgtatatgagtgtttgcttacatgtctgtaagtgcatcgtgtgcatgactggtgcccaccaaggtcagaagagggtcttgggttctctgcaactggacttaacagacagctgtgagctgtcaggtgggtgtggggaaccaatcccataccatctgcaaagcagtgattgttcttaaccaccgaaccatctctgtagctcctatagcttcttgtttgtggtttgttctttgaacagggtcttatgtcgcccaggcttgcctgacacacagccaaggatgatcttcagtttctcatcttcctgcttctgcttgccaaatattgggattgtaggcatacatcaccacccctggttctgctggtgctgggagttaaactcagggccttatgggtgccggcaaacattctactaactgagctaaatctccagcccactcattttgttttggaattatttttggttttaacgttgttggtcaaaacggtgattgattgagcctgcgttcttactcaggatgggtagctaccaaaatatggtactctttttagtttgttttcaaaattatttttgtgtgggtgctgtactcgcttgttcatgataacacgagttgtttgtctcttcctaccttgttgagatgggggtctctcttactgtttctgctgttgatactccaggttagctcacctgacactgtccaggcaattctgtttctgccttctgtgttgtcacaggagtgcaggggttgcaggtgtctgtgcctcatatggctttccccccacctttagttggaccagtccttggttagccacacccacaagttccgcaccacctttaccccagcacatcttgcaggcagggcaaattgtaggtagaaggttgtgtggctgggttggtgtcccaatccttccactagaagccttgcctggtcacagaatcatctggctttgtatacgagttctgggttgaattcaggttgtgagacatatgtggcagtctcccaatttttttcctctggctcttcttcctactccttctcctaccctaccccttttcaccccgcccgcccccccccagattggccaggctagcttgatgaatcctcctgtctctgcctctgagtactgagaggcagtactcataaacatgtgccatcactcctggctgggtcctctgtcatttgtatgaacagaaacatatctactctgtactttttcaggaaagtgctgtggtaatgtctaagaatggcttatgaccttgttacaataaactgtcaactcagactttattcttaaagaatttgatttgccttgaacaaagcaatactgaaaagtcctgggtcatattgcatgtgaagtgttgatgatattacaggtcaggtttctttagatccctctgcatgggatctaaagcttagcttagtctcttgggaattcagtgtcagcatgtaaggttagctggggatcagctgagagctgacagggaagcagtgacactaattgatgtgacaaccacattcaagaggttttgcagttttatatggaattaataatgacactttaaaattgagtttagaacacttaacatgagctccaggctcttaataaatgtaagtgcccaattaattagtgttgctttatttttatttgtatttttagactacattaattttttgtgctaaaatactacataaaatgtatcatctcagctgtttttcagtttttaaaaactaccttgtgagcctttaagcatactgttctgtagtattaagtatgtagggttcggttgggtgtggaaagatgactcagtggttaagagcacatcctgctccagcagaggtcagtttggttccttgcactcacttcccgaagctcacaactgcttgtaactccagtgccaggggaccttgtgccttcttctgaccttagagagcacttatattcatgtggcatatactcacatgggtagacacacacacacacacacacacacacacacacacacacacagaaaaataaaatagcatctgggagtctgaggcaggaggattgctgtgagttccaggccagcttgttctacagaagaaggaatgtctcaaaaacaaaaacaaagaaaatttgctctcatgcaaccaacctactaaactttttccgtctttctaagcaaattagccaccatcagacaccttgccagactcaagggaatgcctttaaaatatagaatataaatatgtgtgaaacacaaagcaaaaactggtcttttgttatcattgcatttcctgttagatccttagtgtctgtggtcttgtgaatgaacaagggtaatatacctctcctaaatgggtgtgaagggagagccttatctcaggagcacttctcattttaatttccatcctcaatagactggaagtaaaaagtttaatcgagccaagctcctgaatgtgggctatctggaagctctcaaggagcaaaactgggactgctttatattccacgatgtggacctggtgcctgagaatgacttcaacctttacacatgtggtgatcagcccaagcacctggtggttggcaggaacagcactgggtacaggtaaggcagctctggctgtgcagcctgttttactatgaccaaggctgtaatgtggtatccggagtgagttaggaaagcaagaggtgcaggaaaatggcccattttcccttaatgtgcagaacagcaattaaaggatgtaataaggagaaaaaaagacctcccacaaccttggcaagaagcacaaaaacaaagggagaggagagcagtatgtaatccaagcatagcaaatcatggtggcctcaccctgcagcacctgtggcaggacttgacagactttcccacacagtagaattctagtcacctgtccatctatcctgatctcctctactggacaaagtgaccataggtcagtgtttggacatgctatctctttttaggacagcttgccagagttctagaaaaaggtggagtacagatatctgattggggatcaggatatccaggacaaattcctttctttcaaagccactatgagaaatgccaccattccttcattcctctctatttctatccccaggagaggaacaaatggttttaattgtgttttataacagctcctagtcatactcaactgaaggaaatagggattgggctaacttctaggtaaattagactgtttgcatgtacgcttccctgtcaccttcctctaagctgccaatcatgtgtattcactaggctaggggccaagaagtcagtttgaaaaggcagtttaatatatgagacaggaagctcctgtggagatggttaatctgcaaacacagctgtatgcacttaggagcgagggaaggagggagggatagagatggatggaagaaaggagagagggagaagtcagtaggaaaataaactaaacgtgaaatagggtgggagactctgccggagcatatagagtgtgaaagggaaactgagtctcctgacaccttccttggtcttcccttccatgttgcctctgcagtgtaggtctctaccttgtactcctcaagagaactcttttctaactctcatgagcattcctctcagggtaggaatgtaacccactccttctgaggtccctgaggaatgacatgtttattaggcttgtttaaggagcatgggtgagcagctacctgcaggaagatgtgtggcactaaggcagcctttctggaggtctgcactaagtatggcagaggggcagcttctctgtgcccacatagacagtggtccattgggttaacctcccttagtctatgtaacttagcacctgtccagatctcacagtcacatgcattttatacatatggctgggaggcatatctggcaacagaggccagggcccagtgaccctctctgtttcctcctcctacgtagaaatgtcaactgtccgcatgtccaattgggattgactctctgcctccgaaccttaagcttcctgttccttctgagcaattacacagaattgttaaggacaggtcttggattaagagtctagattgtatcattgtgttaacctgccttcaatgggcagagataattgcccattcctgctgggaactgattttgacttacactgtggtgtcaccatcatggattccatcagatgctgtgctctaaaagagacaaatgcatacctgagtcttgcagtttaatgtgtccttacaattggccagacacattgctgctattcccagacaccactcacaagcttttgtctcccttgcataatttgaatttgcttgcttaccttttgacttaaatctctgaggaaaattgtgaccctcttttagaaactgaaaataatctcatttgatgacctgtgtgtgtgtgtgtgtgtgtgtgtgtgtgtgcatgctctcgtgtggacatgccaatgggagttaaacataaggcccttgtggtatgcaaaatctccaccactgagttatacttgccctgtacttcctgtcttcatctgttcagacatagattttatattttaagtaaattttattacttgaatttttcctggcttattgtatgcatcatatggatgcctcatttatttgtggccagagagaggtagaccttctatctccttaactttgctatcatgggcaaaattctgccagtggctggcacattcagttgcaggcattcagtgccttctgctggcagctctgttattactgtgtcatggagcatcaaccagctcaggcttcttcacgctcccctttcagccatggcagccatcttccagtaacccacccaaacgacaaacaaaagggaaagaggaaggacagaagctctatgtgctctgggccttttaggaaacacggacttgttcctttggttgcatactacatacaagtgtgcaagaggggtgacgttgtacacatcaaggaaaggggcactgttcaaaaaggaatgccccataagtgttatggcaaaactaaagagtcgacaacattacccagcatgccatgggcattgctgcaaacaagcaaattaagggcaagattcttgccgagagaattaatgtgtggattaagcacatcaagctctcccagagccgagacagcttcccgaagcaggtgaaggaaaatgatcagaagaaaaatgaagcaaaagaagggcacctgggttcagctgaggcaccagcctgctctacccagagccacacacttggtgaggagcctgagctgctggcgcccattccgtacaaattcatgacctaacatacaggagggagtaagtggcctggactgtggaaacaaaacaaacaaacaagaaatattttcacttgccacacattgagcacggggaagttaaagtaatttgtccaagtatttcagccttgtggtgaattttactgccaagaattcctctgaatttgccccctttctccaagaactccattgtaactctatgactatattttccttattctggggaccttacatccctttaaaatgtatgtgtaagcttaccttagggccagttaaaatgtatcctattccagaaaagggaccaaaagcaacaggcagtacagaggcatttgctagatagctgtggtgagactaggtgtgtagttttccctggagatgtctgctgttccttcccagatcagagctggtctcagtgctccttagcctatgttggtcttcaccaacttctcaccaccagatcctcccctttttgcagatctgggtcctcccaggctctgttcctcttggtgtggcagtgattcctttataagaaagctggggttgttcaattccgtggtggcactgtgctctcagccagctgctagagcatcatgagtggtggtattggcagtcttctccagagcttgtatagcatgcatgctgggtctctcatagagactgctctttggtgcctggaaggttttgtggggctggtatttctttctatccacagggtccagatgtcgctgctgctttggtagttgagtcccttcccaattaactagagtctgggaatcttggaacacaagtcattgcccataaatgataggaatacccatgttctaaatattttatttctttttattggttttaggttgaaaatgccgtttcccagaactttaggtactcaaatgtaattgcgatggtcagtctaggttgtcaatttggttagactgagaggtgccaatgagatgagttgggtgtacctcaggggtgatctgaggcatctctagagatagatcctgagagctctgactccatcagtggattaaaggaggggtttgtaatatgatggcattaatgggaagtgatggatattttcagagctggggtctactcggaggaagtaggtcacttgaagtatgttctcaggggtgtatcttgtccagcctctcttcctcatctttgtatcttgactgtcaggaagtggatagccttctccactggccataccttttccatcatgaaattctcacttgccacaggcctgaaagcaatggagccaaacataaaattttcctcctttaaagttgttccctcccccaaaataaaaaaaaataaagtgctttccttggatatttatcatgattataatctggttaacatgactaaatctatttctataatggcataactagggtcactagtttgtactaggagtgtagaaactcctcagcctcagggaagcctcagggatgccacttgtcaggtgggaaatgtctacagtgtactgagtctttctttttgttttttcttcttgtctggggatgtcagtgtttagttggctctggacactgagaactgaagttgacggaagttagaaaccctccatgcagtgccatggctgatgcatagctccctccacctgcacttccaaaggacgtcagttgttttgagggctagcctcatcacagcttgctgccttgtccctagaacacagaagagccctgtcaccctggaggtactctctggtgtgtctcccaatccttctcccactctttaactcccactcttttgtgtcagtcttaacaatggttccacacatgctccgttcttcttgcccactcttggtttccagtcatttctcctactccagcttcgtcaagtgttcacctgtagccacaggtgtcttgtgagcttgcacctttcgtccttcgcctattggcaaaaggcccaggaacatctccaatatagcctaagagtaatttactgtcttgccctcaaaaccaaattattttctttatactcaatttttgtgagaggcactgtatttcatccagttgcccaagccagcagttcagggcagtgagattttgtgttgagttctgtaggaaacaaactcgtaaggtggagatttgcagagccagtacacacatatcgtggactggagctgtctcctaattcacacttcttcactccccaaagcaaaagaggttaaaaaattattcatcatgactcattcatgctgaacatggatggaacccacaattcttcctcacctggtgcccttagcagctgttaacattccttggattggtacctgggatggaagctcactgacatttgagcaatagtgccctcaggtatccttacaggtcttgaataccggtgttatcaataacaggtatgtggggtcatcttgtttagtgatctcaacagcagcttgaatgccaggaggacagggaggcagacatgagaaaagactaaatggatgaaatgggtggaagcgtgttctcctcaagtgttcctggaatgccacccccagaagcagagacagctggagtgtctgtgggaacaaagggtccttgtgctaaatgtcactacttttctcccttctcttttgctgcaggttgcgatacagtaaatattttgggggtgttactgccctcagcagagaacagtttttcaaggtgaatggattctctaacaactactggggatggggaggcgaagacgatgacctcagactcaggtgaacagcagagaagggggccttcatggggctctgttatcatggtggctctggaaacccgtgcttatgtgtagttcctataaatgcccggccagcaggtcatgaggctacagcatttggcttaaaaagggtggcaaggtgtgaaggcagggcaaaatgaccgaaattgttctttgtcattggaagcctagaaaccaaggatgatcgtctattgctgagtttggggtgcagaagtgttggtaggggccttggggcccactagtgaatgggaagtcccaaacttaaggttgtctgagagactgccactctgagaatggcctatgacaagtcttgtgcttttcctcgatccccaaggccctgacactgttcccagcatatggagtatagtgctgttgtaaggccttcccccgaaagggaagatccttactcaagtcttgggatgacgcgatcccccaagaactcatgagagactgtccttgctgcaatcgcacggggtttattgacaggagccagcgcgctggggccgagactcatatcccacaaggggtagaggagtttcgaccccgaatggctgggaataggggtttttaaaggaagaaaccacaacccaaaataccaagaataccagtgagggaagaaacctcaacccaaaataccaagaataccagtgaagggtcccacgggaaaacacaaggggaaactccctatttcttaagattgtaagattctaatctaactttttatggctagccttctcc

SEQ ID NO: 13 - DNA, 73214 bp, Cricetulus griseus
  >scaffold_8 dna:scaffold scaffold:CHOK1GS_HDv1:scaffold_8:70124524:70197737:1
  misc_feature 3909..4008: /note="n is unknown"
  misc_feature 34891..34990: /note="n is unknown"
ggttggccggtgactgtctataagggtcgtcttgattgctaacaggggtaggtagacccaccctgaaggtgggagacatcatttcttgggttgatcccagactgtggttaagagtagagaaaactactgtattaagcacaagcgagcaagcaaaggcaggcacatctattctctctgctcttgagggtgggtgtgatcacagacaagaacctgacttgacttctccacaacgatggactgtgacctggaactgtaagctaaataaatcctttctcacccaagttgcctttggtcaggatattccacctgacgcacaacacgaaatgaaagcagagcacacgtggagtgtggtttcactttcaatgtgcctcctgccacccgccttcaatattcatgcctggtcatggcttggctacacaatgccactacgccccagcttcccctaatcacttccagtttgccttgctcccttgctctgagccaagacaatggttgtctaaattacacaagcctgagtgtgtaagtcacagccttcacaccaggctcactgcactggagtgagtaatctcatttccaaccttagaagccagtctgcccccttcctgtaaccatcttgcagccctcatagtacaaaatgagtcattagactgtccatcacaacaataacatgactcacacgttagcaaagacagagagggtgtgcttggtgtacacagaaatgtaaggtttgcaaaattctgggatttagcttccttgggaagggagaaaagaagaaatgaattccacattttctaaagtgaatcatacgaaatcccacagcaggcaaacatctgcgagaactgatctccaaggactccatgcaaatggtcactggtatagatgtgcttttaagcaaaaacagatgtttcagatcaaaatgttttaaaagagagagatagaaagaaagaaagaaaagcacataaaacaaccaagttcaaagacatcttggcttcatttctttccagctagggtgactcctcactgagaaaaatgacagagagggctggaagagaaaaaccttctgttttgcaataaaaagtcaacagagccacaggcacaggtgtggcagccacgcactggccaggaggcgtgcactcgcctacccggcgtggctttggaggcctgggctgtgatatgtcctattactcatgcattcccgtggcagtcattgatttatttgaacactcctctgctccgacctccttggaatattatttcaaggagcacatggtgggaggcgttaggaaataagtcacagggatccagaagccggttaagctgacatcagtgacgtcttctctatgctgttggagaagctcctttgcctacactcaactccgggaggaacctcaaccttcagagacctacacatggctctgtagatggacaaaagttttccatgccccaaccaaagtgggcccttccttccctgggaggatgcttgtgaagggccctcagcctgaagcaggtacctgtgctggaaaatagagtgcaccggaaggcaacctagccagaccaccctctgccattccaatccatggtgggaacaggtgggcagagctagggcattcagcccagaggcgcaggcattttgctgacagtaagcaaggaatggtcacagcagccagcagaattctaagacagaaaactcagtctttgggtcctgaagccaaatgctctggaccctggtgcttaatctgtccggaaagaaaatcaaacagatccgtaaatgtggtcacccgaggacaccgcatgctccctccgtacgtgtggccgcagaagcacgtcactggtagtgtcaggagcacttggtgacctcaaggtttggtctgcatgcttccagacatctgtgactgctagggcagatgtcatgtcaatcaaacattcagaggaggccacaggcggtgctcggcatttgtggacctggtgcagagagacgagtaatcctacatcttgtttctgggcacacaagaagactacatttcccagtctgtgttgtggctaccttgtccatccctttggattctggccatgaaactcccacactgacctttgacacagttcttttttccctcttttgtgacagtccctgaggtcatatattaaaggtgagttgacaggacccctgagttaccacacagactaagcccaggaaagctgccaggtacctcaggtgtgtatgtgccaacagggtctttgctaaagacactgtgatactgagatggtttcttacaacagtaagtgcttattttcttcagtcataatctagttgggggagttacaaacgaccgccgaaaatagccactttcaactaattggctttctgacattttcctgaccaaccacgtagttcaaaatcagcaccaaagaatctcagttgggaaggcaaagagacctagagaacaaaaggagctccatgaggctctcctggggcctccctcctcgggtcactgctggggtggaaagaaccagaaaggctgtccacgttctctggctctaagcacagctatttttagaacactctagagggcgtctctcccttattcctaaatgtatcagaggatgaaattacagtccccagtcatcctactcctgagggaacgaattgctttctgattgattagctctgtgtcgtgattcccgactcttagagtacagatggataccaaggacgtctctgcactgaccagggaagagacacaggaaaacatcagcaggatacattgttctgtgttccaatgagtgagcaggatttggtgaggagggaagagtgagctctgaggtgggggtggggcatggagggaggaggtgtgaactctgatgatggggtgtgtcttagggtttcttttgctgtgaagagacactataatcacggcaactcttctaaaggaaaacatttaattgaggtgtcagcttacagtttcagaggttcagtctgtcatcatcatggcagggagcatggcggtgctcaggcagatgtggagctggagaaggagctgagagttctgtgtctcagtctgtagtcaacaggaagtgaactgaggcaccccctagtatcttgagcatatgagaccctggagcccgcctccacagtgacacacttcctccaacaagaccacacctactctaccgaggccacgcctcctagtagtgtcactccctttggaggccattttctttcaaaccatcacagggtgggaacttcccaggggaggcggccgttaggggttctggaagttggtgagagagaacttggaacattcaagggaggaataaagactttgtgagagaattctggaggccaaaggagtgtggtgagagatgcttcttggctgaggagaaacttccatttggggcatggagctgaatgagaatgtgaccaagaagatgtgacaggtggagcaagggccccccatgggtgtccaagctctaagacctggacagtcccttcatgtccaagggacttggcagatgtgactaggtgaagaagaaccttgagatggggagatgatcctaaatgaaatcatgactcccttcctaagaacaggggtgatagactcagaacctgtcgagataagagatgaaggcatgggctagggagatggctctgtagacaaaagtgatgattatacacctgagttcaaccccaggagcccatgtaagaagcctgatgtggtggcataacaccaggatctccaaggccagctagccaggaacacacagcacaatgacagaaacaagacagacccaaccccaattggatgtggggagttaactcctgaaagctgtcttctaaccctccacttgcacacgtcacggcacatccatgtacacactcactcacacacacacacacacacacacacacannnnnnnnnnnnnnnnnnnnnnnnnnnnnnnnnnnnnnnnnnnnnnnnnnnnnnnnnnnnnnnnnnnnnnnnnnnnnnnnnnnnnnnnnnnnnnnnnnnnctcacacacacgcacacacacatacacacacatacacacactcacacacactcacacacactcacacacacacatacacacactcacacacactcacacactcacacactcacacacacactcacacactcacacacacacacactcacacacacacacacatgcacacacacatacacacactcacacacacacacacacactaggaggtgggaagagaggaaggaaaggaggaggaggaagagaagacaaagaggattctctactgctgtggtgaaacaccattaccaaaagcagcttgggagggaaagggtttatttcagcttatagtttatagtgtgtagtggagagaagtcaggacaggaactcaaggctgggccttggaatcagggtttgaagcagaagccaccgaggaacgtggcttaccggcttgcttctcttggcttgctcattctgatttcccgtattctccaggaccacccatgcaagcatacaacaccctgccctaagcagcccagccttacacatgccctgttccaccttggcatggatgaggctattgcaggccctccctgataaaccaaacctctgtctgacccaggggctgccagggagtgtcatagagatgtcaacaccaagcacacgaccatacttagtgcttccagcttctctgtttcaggaggcaggatagtgagtgtgcaatgatcgtgtgggagtgtccataacctcatccccagaccctggacacactgccacacacggcaaagaagggaggctgcagggggatttcagactgcctacatgacacagacataccctggtgtgatcaccaggactaacagatgtgcgagagggaagcagagtcaggtggacatgagccagggactgctgacactgaacacggcaggagggagacaagctgaggcagaggagtggcatttggaaagctagaagaggcaagaaagtgtttacccctgggccttcagagaggaggcatccttgcttagtccttgacttttacctaataaaactggcaccaaatgaccagatttctggcctccagacttgcaaggggtgtgtgtgtgtgtatgtgtgtgtgtgtgtgtgtgtgtgtgtgtgtgtgtgtgtgtgtgagggggtgcctgtgcccctgtaaccatgtgtatgtggaggccacaggttgacatcagtaccttctttcgttgcccccaacatgcattttgagacaggatctctgagtggcctgggggcccatcaatcaatcctattatgttgtctatctagccggctccagggatccacccatctccttatcttcagtgcttggattacaggcatgtatgcccatgctctgctactttgattcaggtttgggggatcaaacttgagtcctcacttgtgtggcaagtgtttttaccaatcgcaccatctccctgacccccacagatgtttcagccaagccattgccaggtagcatcttccggcagcaacagcaagccatgtgtctccacttgctccttctcccacttggactccagacctgccctcgcttctctgccttcctgaagtctaatatttgtccctttgtatcgatgacaacagccacctcctctaagacacactccctaagggcttctttcttgaattctctgcgtcatatcttgagtgtcacacagctccctcttgctcaagaacaacgtaaaggtacagacctgtctgcctttccaaaggactaagatgatcaccccttggcccagatgactaccacaaatgatggaaacagatccagtgtgacggatgccatctactggggaatctagtatcaggtctagccagggtttcccagcagtcaacaagagaaggcaaggcatggttggtctctgagccctacacatacaccgtgctgcacatgtctatcttcacacataagagcatacgcagacacacacaaagacaaaaaaaaatcaccaaaatcctcaactgatagaactaatgtcagaagagcacttatcaaaggttgctcattttacccatcaggcactggggtctggtgctgggaaacctggcacttttcagcaactttcaaaaatatttgagcctggcagtgatggtgcatacctctaatcccagcacttggaaggcagaggcaggagaaggccagcctgatctcagagagagttccaggacagccaggactacacagagaaaccatgtcgaaaggggggcgggaggggggagaaagggagggagggagggaaggaaggaaaagaaaaatatttgaaagtccagataacaaaggaaaatgtgtgaagccaacattttcacaggatgtctgcagcattcctcagtttattaattaccagctttttgcacagcaacaagtcccacttttcaaagcagcttgcaaccttaatttccttgcccaccagaatttagaatttttgagcgcatgcagcggataaagaaactgttttcatccatatagttgtagtacaggttttttttaaaatcttttcatgcttttccttaacattcaaaaatagtagagatgggaagttggcaattttgatccatgggtttaacatcatttggtctccagaagaaagctgaaggcttgggtggggactggccagtcacaaggtgagttgtggggatgagagttatgataatggtggttactgttcctcaccccattgtcctgtgtccttaattatttatttatgcaacatagaactgactgttttataatctacaactcagtgacatttggtctacttactgttttacacggtttcaagtctcccaattccttcccttcagccctcctagggacctgtctgcttcacgctttggtgaagttgcctattctggacctttcgcagaaatggactctatctgtgggcttttatgtttagtctctttcactgggcatgatgttcctaaggttcgtcttggctggggtctgtcagtccttgagtactggggttgctggggctcgcaggctgagggatgtagtccaccatgacagggtttctcaatcaaaccaagctcatccatgtggccagtctcatagccaatagccagcttgctctggagattacctccctctgtcttcccaggctggaatgacaggctggcacctacactcacctggccacacttacatggcatccaaggacccaaactctggttctcacacttgggccacgaagctttaacggctgaacaagcatctaccccaggcctcaactaaaaggcaatatggacaggaagctgtgctgtagacagccgggttaaagaatgaaaagacacggagagaaaccctcgtagaaagagacagagtccacagcatagggagcatgcagaagcttggctgtggctgcaagagggccgaagcaggagcagcaggtgagcaggctggggcgggttcaggagtccttgtcccaggggaaggccttgagggagggagctgtttcacccatggtttactttggctcaccaccacaatccaagctctgttcttcaggcctgcgcttctagttcagcccaaatagtttctatttgcagaaggtcttaggggaagaaacagaccagctctgctgccagtcactgagcaaacaccccagccctgcagcaagggcctgaatgtattgtgtcaggaagcagtcacctccccgagccagcagacactggctatagctccaattctatatccaatgtcatagttcggtggctacagcaccactgcaaagtccacccagtccactctctgaccaaacacagctccgaaaggccatttcctgtcctcagcagagcagtgggacaaagccagacaggacagtggggccagagaagctgctcactctgcagcaagcacaggaccttaggttccacaccacaaaagctgggcagggcaatgcaccccctgaccctgttattatagccaaggcccacagaggatgggtcgctctgcctggtcccgcagcttataaatggtaaaatccagataaaatccaggttttctggctgcctttcagaacacccccaattagagcctacatccagagcgaaagcttccgtggagctgcaactgctgtgcaatctgccaatgtgaaacaccctgtgatgatgtgaagactgggacatgaggcatattctctgaatcttagtcctaatgtcgttttccctaaacttttcttggtttctcttcccagcttcggcagtttctgcccccaaagacactaaaagccgtgaatacactgatcactttggtagactgaaggggtttgaggggagagagattgggggagcctgagatggtggaagggaggctgcataggagggctggggaagggggctcatgggagggaggcttcgggagaggttagcgtgagtagcagaggtgaaatggctgggagctcgctggattgcctgtttagacctccaccgcctggcttcatcttgacatgtgacaaggctgacgcaggcagccatagggctgttgttggcttcctttgtgttctctggggagctggagactccaatgaggtcctggagagttgtactttttctcccacaatctgaagctgacttctggcactcattcagcaaacacttggcactgcagagtgaacacgcaaagcaagccagggttttcttatctcctgtcgccacaactggggaacaagagcctaaccagggtagacctgggatgtccttaggaaaatcacgatttgagcaatggatccacatgcccaacgtggcactatctggcctgggcaaaatgagagctgagctcctctatccacacaccctgggtaaccccaagacacagggcctagcattctgccctgggctccaccactgaactgtctccaaagagaatgtcaagctttcaacagagataggtgtcaacatggtgtctcactagaaagagtcaatggtccgttaaaaacttcatttggcaccagtattaagagtggcatgaaataatctacatgttataattccccacacactctctcttgatcttaaagaggttttgtcttttgaaactggcatgagaactgggctcccaagagaggtacggcttatttgccagctcctgtctgtgccgatggtgctgggtcgtgggtgaggccttctgaacttctaaaacgtttaaaagggagccatggaagtggactttgtgagaaactatgcatttaacacccctttaaactcgctccagtgtttcgatcaactgggcaaacatttaataattcacatttacagcaaccataaaagccttatcaggcagattagcacatgatgtcaaaggaaaaaggaaaggaactgaacccttagcacatgagacctgtgctgaatctcaatgtggagcccacattaaaacctccaagcctggccttcctggttccacaggctttccctagccctgtcaggccctgtgcctccccttcaaaagccacaatgtctctttgcattttaaacaaggagggctatggaactctgaatagtagcatctggtgtcccagcaggaagctgataagaaagattgcttttgagttcaaagccaactggggcagtgtacccagtgagttcaagttcaacctgggattcatagggatctccaaaaacacacaggaaaggttttggggcaccaagggctccaagcccaccctttccgttggtttagagttaactctttgtttaatggtctcccagtaagggttttaatgtgttttgttttgtcttttcttacttggtttctgtatatcccaaaggtctttgatggggccctgtgactcactggtgaccctgtctggactttctcccgccagatagcatctgggtgactcatgcctatgacacctgggagcccagtggaggtactgtttgttcaggtcacagtcactacacccctgctcttcctggaacaccatccaaaagctggtggcagccattcctagctcctctctggagctccagaaacgacaagttggcctattcatttagccagcacatagctaaaatgatctagtcgattctgggaatgagaatggagaggtgaccccagcctagaggtcaaagcaggccagaggcacccattcagaaggctggattgaccacaggagcttgctcccctcctccagtcagctctcagctggtcacctttgctccactcccagaagggaatgttcaccttggttgcaatgcctcatctctccgctcagagcttcacctcaaatacagaaagcacaaagggttactgtgtgggccactgcccatgaggcagccagagcagaaatcaccagtaatatgagactgttggatgctccacagccactagcttagtcattgtttaaatcagaagttggcactttgttctgagcagagaccaatacctggatgttcaagttgtactgaaacccatggcagggacacaacctctgagaagtggacactgggccatccttgatccctgtggctgatcagcctgagacctcaggaactcatgaactcactgggaacacagattttctcttctgatcaacaaggaggtaggaacaggtctacactacacctgaagacactggggttcctgagcctcttgacctgtgacatgagaactactctgaccttggtcatctccattcttacacctccatgtgtgaacagttccagaagcataattctgcaaggaccaaagccagaggcgaggatgagcaagacacagctcatttcatgaagtaagattaggaaggcttattaaaatgtcaaacaatggcttccttcagctagtccttctgttgctggtttaggaaatgctacttttctttaaaaaaaaaatgtccttcatagaaacatgtgctgggtttattgttattactttggaatgaatgttttaagtacttgtctgctttgttttctcgtgtggtaaaaaacggtacaaagaatcatatgaacaagacctcctgtgggttttaattacagttaagaatggaaccaggaaaatggctcagtagataactgtgcttgctacacaaacatgatggcctgagttaggatcgccagcacccatttcaaaagccatgtgtgcctttaatcccactgctggtggggtagagggaagataggacaagttaccaatgtagccaaaaaccagggaactccactttctgtgacagaccaccatctcaaaggagtagggtggagacttataaggaagcacacacctacacacacatacacatacatacacacacacacacacacacacacacacacactccaccatcacatgcacacacacacacacacacactaaaggaacactcccccaaaatctgagctcatagtccaggaagccacttttggggggttacagaagcaaagtggctgccccgacctcagatacccaatgcttgacctgtggtctcaaaaacagcttacttcctcattctgagtccctacctttagctacaaagacctcagtctgaagcactaatctggggtcccctgaacactggtcattgtgtgttctgtgccctgatcacagtgtggccataactggagacactatctcttgcattaaataaagttttctctagctatctgaggtcatctaagttcttagcttttatttcttcctacaaatttaattcttactcatccttacacacacacacacacacacacacacacacacacacaccatcactaccaccaaaccacatacacacacactttgcacacagacatgcacacacacacaacaccactacaaccaaaccacacacacacacacacacacacacacacacacacacacacacacacacactacatacatacacatgcacacagacaccactaccaccaccaaaccacacacacttatgcacatactacacacatcacatacactgcacacacactacacactacacactacacacacacaatcccagtatctgggtaatgtaagcagaaggattaaaagttggaggccagtctgggctacacagtaagatagaccatttctcaaaaacacacaaaacagaaataaagttcctgaaaagttccaacattcacaagacctctcccaaagttgtactctttttttgtttaaacaacttctagatggagtccatccaccgagctgtctgcatgtctggaaggggactgtccatccaccaggctgtctgcatgtctggaagggagctccagggatgtaactttcatagatcatcacatgtgctggagtgaacttttcagtgatgcaacagcctttgagtcaccctgttcctctcacccaccaccctgtaataacctcaataaagacactggttcactacaatagccttgtgtggaattggtctttaatctgtcatcagtatcctatctgggatgagcacatttttaattttttagatttatttattgtatttttgtgtatgagtggtttgcctgagtgtctgtatgtgtctgccatgtgcatatcatacccaagaaatctagaggagggtgctagatcacctggaactggagtcatgaagggttgtgatccaccgtgtgggtgctgagaattgaacccaggtcttctgtaagagcaaccaatgctcttaaccactgagccatatcttcaaatatttattgtcacctttccaaatagcagagtcacccaattagactacatttcccaggattccttgcagccaaatatggtcgtatgacaagatcaaagtaattaccacatggatttgaatcaatgcccttcagaggggtatgcctctgcatctcttccttactcagggatgggtgtggatatggcactaagctagggaacttagcagataagagacagtcattggagccacactgagccactgtccccagtatcatggagagaacattcaagttctatctcactgaagccccagcatttgtaggcacttttactgacatgttatttgcaagtgtagttctcatgagggagaccacttgcttttactgtatttttgttgttgatgctgtttttgagacagtcttactctgtagttcacactggcatgaaactcatgtggtctctttctgcctcatctttcagagtactggggttacagaccccactctccatctcccactcccctaccctcccacacacccctacttccatgaatggaagactaatctataaactaaaggcccttggagccacctttcttctgcccagaggctctgtgttgaattgcagaataaagtgccccctgaaaggtgtcctcagcctatgacagctcatgggacagagacacttgagtctgcaacatgaatctgggaaggagtgggagcaagccaggacacacagtttcctcgggtcgctggaaccgatggaaacaatttgtgtcagggtggcccagaggttttgctatgatgctgataagactgagaagccagactgtaggctctatggccagacgtgtggcacactgtcctttatcttcacaggcaatgtcacagaaggagctaatggtccccagcggctgtcacccagagggagagtcctagtagcatactctctgactctaccttagtcattggtgagtgacaccctgatcagggttaaaggtggccctgcctgagtggttggtttggattcgaaaagagtcataaagtctgggctgagtgggatggagctacaaacatacctagttccatccattcatccttcaatcattgactagactcaggagtgtccagaaacacctagagatccctggcactgaaaaaaagaaagtactggaacaccttaaggaacatatgtcaaggccctgccctacctaagcttatgtttgcatatggggaaacaataatgaggttagcagagtactaacaagtgactttcaaaatggccaacactgggaagaagggcattagcagctgggatactgagaggaagttgaggtcctagcccagcagggtcagaaaaagcattccatgccattaggtttgaattgtgaaacacagccagacctgtggcaatgaaaagaaggggaattccaagaaaccctaagtgcaaaggtcatggggggacagcatgggctgttctagaaacaggcagaggctggtgtgctgggtttgagcatgaggaggggcaggaggttgatcatgggaaaccaaaagggttccattctattctttggattcagaaggaaaaggtgacctatgggatttgcacatgacaaggttggcttcgaagtgagggatgagttacaggagaggaatctgaaggatgacctggatactgagtgggtcaggccagtgatggcgataaccagagggcagtggcagacagggtgagaagagggttggcctgcgttttgtgatggaaataaatcccgggggtctgactgatggatgactcctggatcctgaaaagaacaggtagatgtcaggtgtcggttatgtttcttgtagttgtgaccaaatacataaccaaaaaagcaactcgagggaggaagggcttatgttggctcacagactgagggctacagtacatcatggcagagagcacaaagaggcagctggctccatggtgcctggagatctgcactggaatgtctcgcctcttagtagaagagagaacagagagcaagccggaagtatgctgcaaaatcttgaagcttgccagccactgtctggttcagcattttactctttaccttgcccccttgccttgataagaccccccaatttcttagaaagcaaagttctctgaccatcaagaacactcaagactggggggcgggcggtgccacgtcaagaggctgcatgctgggactcactcactcccgagacagagccccttttctgttgtgtcactttggtggtacacacactttggtctgtcgtgggatccctatctgtggtgagtagacatgtgtgttgagtctccccaagaatagttttgtcacaccacaccatcggcacccaaacagggagccaacagaaccaaagatgagtttgggaggagtgagtgcatggtcctggctggaggtaacaaggcaggcacctgaggcggagaagcctgaggggggcatcctcagaggaaattctcatagagttggcctttcctatatggtgtgtgttagcacacctttgtatgaatgacagtggttgcacggttcttgctatgagcagtgaggcatgcaactaaggcagagccatcgggattaggagtgtctgtgggaggaaacccgggacatcagtcttcgtctgcatgtggcatgctggctcgatgagtgaagtccaccatataaatatggagattccctgaatgcagctaaaggtttagaggaaatattgccgtctttgagatttttgaagaaaggtcaagcctgtcggcaagcagcgtcgaggtttcatatgagaatatgggttgtgcatagttagaaatgaatctgaggccaagatggcagccaagcaggaagttgtctgtgtccagcaggaagttgtctgtgtccagcaggaagttgtctgtgtcaagcaggaagttgtctgtgtcaagcaggaagttgtctgtgtcaaggagcaattacaacaagaaagagagatggggggcaccctccatgttaacccctgatcagacaagtaaattagataaagagagggtgggatggaggtgttggcttgccagggctggaggggaaagatagtagagctagtagataaagatagttagagccgtgctcagaagcccttcctgggacccaagaacttggaacccgtcaggagattcagagagtgaggaagaagagaagatggtaaaagcaatagaaggtccaacctttagtagaaaaggagggaaaacctctatcccagcatgcaggtggaggcatcggccttggcttggtgcaagaagctagtatgatcaggaaatgctcagcccttgaattgctggagttagggaaggcttttaaatggagcctgtctcaggctggcttgcaaggctgtgggacatgggagtgggcgggatcagtccggctgctatggaagaaggaaaactgggtgatttaatgtcccatccctccttaaggcgaaggctgcatagccctcagacaccgtgatggaagtcactccctggtggactggcttatcaaagccattaggaacacttggttgtctctgaagtcctcacaagtatcatgagctgggggaccaaagaggaggggcagatgctattggaggaagtgggaataagagaagctgtgttggaaccccactgggccacaaagaaaggtgttcacagaggagttaaagaaaaggttaacccagaaaggacctcaggagtgatctgaaacgtcagtggttttgctgagccatgtggtgggacaagaccattataaaataggaaaggctttggcagatcagcaggacttagagcaatgtgtaaagggtatctgtatgtaaagtgagagagcaacctgaggaggtaaagcagaaaaagaagttcatctgggttcctcaaaaacaaatgtggcaagatctgtgtcgagctggagttcctaagggtgggggggtggggggtgatagaaagccaaactgtatgctttggagtttctgcacggctttaaaaggtgaggagcagttcacagaagacttatgtgatggaataattcaaatgaagattatcaagcctgcccctgggtggtaattatcccccacacacatacactgaagagagtatgcttccctccagcagaaggttatgctagggtggagatggtttgcctagtcaggaactctcccgggcatggtgaatggggaagtaacagctacagctacatccacggtgcctgtctgacctggggagccagcaggtgtaatgtgggagagcaagatgatatttccctttggccctgagtagatctggacagattgagttggacccactgaatttatcaagtacacagaaactcggggaggctctgtggaagggctccaggatgtggaaataccatagctcagagagaatgactggggttacagggagttaattaagttagcgcctcttgtccatgcttggcacccaaccttgatctggagaggaagcaactggtacaaatggatggaaccttccatgctgtgtagaccttgcttgtgccccactttaataatctgagttgtgagcttctgggatcacctgacacttgctgagaacagatggcaacaggcctcaggcatgtgtgtttctgcccatagatcactgtggctgtcagtctcaacaggtgctttaccgaggttatctttgtaatgccactatttgctatgggatggtggtttgggatgttgctttgtcttacccatcctctgaaaacagtttgtgatgtatagatgacataatgatagatttggaaagccaccagagagacaaccagttacaatgacacttccacctatcttacaaccctactggtgctgggttaactgaaaggaaaaatgggttgttaaaacaacagctaaagagtttaaatccaaaaggtaccctacatggatgaaaatggacacccccagaggccacaaggttattgaatgaaaacccagtgccaggagtgggctaccatcctgtgagttgttggcctgggaaacccccgagtgcacaaatcataaaagctattggtactactattggttgtatgctagaactaaacagtaagaccccattgaggcatcacgtgtgcatgtcctgactgcagggcaggaaaaaggaagctaggaggacctgggagttcccacccttctggctggcttttgtattgtcagaagagaccatgcaggatgctggtggtgaattgtcaccgacatccctgtgtgctaaaatcctgaaatgccaggcaggatgttcccgcccatgcaatagtggcttagctatcatgggtaaggtcaacagcctttaatttggatgtaaggcctgctacataagagggaactcacagctggtaccataaatcataacagaaacccgtggctagggagtcacaggtaccactgggaagcaacttctatagttttattagatgactagatgtgtctgtcaaagtacctgtaagcgcatgtgtttacacccatagacggctgtagttgtcagtctcaggcatgtgtgtttacacccatagacggctgtagttgtcagtctcaggcatgtgtgtgtttacacccatagacggctgtagttgtcagtctcaggcatgtgtgtttacacccatagacggctgtagctgtcagtctcaggcatgtgtgtttacacccatagacggctgtagttgtcagtctcaggcatgtgtgtttacacccatagacggctgtagctgtcagtctcaggcatgtgtgtttacacccatagacggctgtagttgtcagtctcaggcatgtgtgtgtttacacccatagacggctgtagttgtcagtctcaggcatgtgtgtttacacccatagacggctgtagttgtcagtctcaagcatgtgtgtttacacccatagatcgctgtggctgtcagtctcaacacataaccatcagggaagctcctgagaacaagtgactggaacagtagcatggtgacctatttcttacccataggtgggcatctatagtcatcccctccaaggctcagggatcattgagggagaggaggcagaaaaaaatgtaagatctggaagaaggggtggaatgttgaagaacagtttcatctgagatgcaaacattccatcctgaagaaaatctcttcaaactggatgggaaaaaaaaaaaaatagaacaaaactcaaaacagcttcaggaagtccctgaaactgaccagatccacttggaccctgtcagaataaacaaagaaaactgagagtccctctcagacaatctgagctgcaaagatgactctcagagaacagctgcaaagagaccagctgagctgcctggaagaggtttaggccagctgagacacctggaaaggacattctccagcctgtggagctgcctgcaggctgtgtatgagctccaggttcccagcattgtgagctggcacccatgctggggcacagctgtctttgagtcatttctgctcctgtaagtgacttctaacctatatccctataagtaactccaataaaactcattggtttaccaaactggactttggtgatatctgtactttgatctgttgtgagatccctatctggggtggatagacgtgtgtgtgtgtgtgtgtgtgtgtgtgtgtgtgtgtgtgtgtctgtctgtctgtctgtctgtctgtctgtctgtctgtctgtcttgctctgtgtgtctctccatctctcctctctctcctctctctctccccctctctctctccctctctcctcctctcctctctctctctctctctctctctctctctctctctctctctctctctctctctctctctctctggaccgctcatgtagatcagtctgggcttgagcatctgcctatgctttcagagtgctgggattaaagctctgacccaccatgctgggctgctctcattttcatggaggaatgaaagcactaagcctctgcctggttaatcactttactctttacaccttaaaaatttgcttttactctcaactgcctttataaaaccctcattttcttataaagtttcttatcttggctgccaattttctctgtatcttgctgtcacttctcacaggagaactgtacaaattttctggtattgtcatgactaatcttacaaaccaagcatcctaaatgagagaaccctattgcttcactgttctataggccagaagtccagagccaaggtgtcaacaagggccctgacagcattgaaggcccccagggaagatcctgcctcacctttcctaacttctggtggccgcaggcatcccttggcttatggctgcatcactataatctgccaccatctttagctgtctccatgccttgcctctgtgtgttcctcctaaggatattgtcactggatcaagcgccaccagagtagcccaggtggcctcatctttagttccctattgtggctgcaaagtccttttaaccaaataaggccatactcctagggtgggcagggtccatgcctcacacctgcaggaccacacggcatcctttgtggaaagtgaccatgcatctaaccttaccatggtggaatacaagtctggcggtaggttatatttgaggtggctgagacaactcaggctctgagctccagaacctatctccgaggaaagcaaacccaaagaacatcggatctatacccttctgcaaagcaaagggaggacatgcgtccctgcgcgtcgacagctagcatgtctgtataaagagcagagggccaaagggccactgagtcactagtcacgtctcacgcattgactagggtgacagggcctgttctacctatcctagggaaagggggaggggtagtgtcatgggccacagacacctacagctcaattctgtctgtgtgggagaacactgtagagaagaatgaagagctagtgttggagctcctgggagctggctctgcaacttaaggcaagcgacttacattggagatggaggtgccttccgaaaagcaatgtcacagaaggctgcgaccaggaataataaaagtgtgatataaaagatgggctgacgagatgctcgttaggtaaacttgtcaccaaggctgatgacctgagtttaaccccttgaacccacatggtggaagaaaagaaatgactcccacaagttaccctctgaccacacacacacacacacacacacacacacacacacacacacactatgtaaaacaccacataaatgagaattctgtcattatagttcttaccagttagcaaagcacatccattatatactcttaatccttaaattcacatgctggtgatatttggaggcagggcctttggggaggtttttcggggttagatgaggtcttggaagtgggacccatgtggaattagaggcttcataaggaggagccacactggcgtgcctctgcctcccgtggctgtgacaccacagccgcacactgttgcagaaagaatacataaaggcagacgtgaagctgtttgaagaagaaaaaggggtcaaacagacagaacacagcagagtatgccaggagtaccctaagcaattgcgtgaaaaccgcctcagtaaggccacatgacaaattcaaagtaagttcaaaacaaaccaacccagaaaggcaagaagaagaccgtgctcttggatttccaacctctacaactgggggctcaataaaagtttatttatggatgcctccgtctagaatccctcactgcagcaacagagtgcagttacacggtctttttaactgatggaactctgtgtcagtggctgctaactgacatcttacatttccatttgaaaggtgacaaaaagccatcctgagaagagctggggtgattcactccacagatatttactaaataatatgccaggaggtgtcccaagcaccacagtaaagtagtgccaaaccagatacaattctggtcctaatggtgtggaatccatgctggagagacaaagaagtaattaatgaggtgaaacgatgtattatttaattgaaagaaaggactcgggtgagcagtaaaagaacacttacctagcaggggcaaggccccatcttctgcatggcaaaacaaatcgtaaagaacattacataacattagagatttaagaaaaataaataaatctacatgctgtagtcaagtacattgaaaacaaaaaatgacacagagtggccagggaaggtctccaggtggcttcttagttagctaatgtggatttatctaaggtcagggagtggagtcttggaagggaacagttcgaggaagcctcttgcctggcagttgcgggtatatactgaggcccggggaacagcccagcatggggagacggccactgtgaagagatgagccaaaaggagccatgggggagacccatgagctgccaggtcacatagcctctcacggaactctggctttcctctgaggtacatgagagctactataagtctttagctgaggaagggctggctgactgatacgacacagcccctctgtcagagcctgtagaattcatagaagaattcaaattcacaagttctattgaaaagtcattttctaaatgtcaaatgcctgcttcctccccactaaagtacagcaggtggttcttggcagggaaacagtccattccttccgacacaagcaccgaagggtaggatggaaatgaagaaacgggaggcacactggctaagtttagtcagccttcacacttgctaccaagaagcacatatgctcgggctcagtgccggaagagggttgccattgtctctctcgacacagaacccagttattttggggtggccaagtgtctggaggaggctctgctactccccactctgccaggaaggaggcttaggggctgagacaggacataaggggctagaggtcaccatggccttgtcttttccttcccagctcaggctggtccaagaaacggacatggaactgtgttctcactatggtgttaaacaccccacacagttcagccatcgtcacagaccagccacttcccatgtatctacaaacagaaatggataactgagtatgattaaaaaaaaaaaaaaaaaaaggagagagagtgagggaaacagcaagacggcctttgcagctggggccaccacctgctcacagcagtgactgccggcttcctgcaccttagatgtccctcccaggcctgagttgggagtcccagtgcaaaatgaaaaagaatctcttgttcaaaatctgtgactttcaagatggtaatagcaccgctagaatccaaaggggtgttttctttgctaggagactggaggtcaactccagaattccgtgagaatctaccaaaagacaagggctgttgaccttcactgaaaactaagaaaggagggtgatcctcctcctacttagactgcatcaaaagtcatatttaatttggctgcactggggatggagagatggcttggtggttacaaaatgcttggtgttctgccagagtgacccaggttgggttcccagcacccatccacatcaggcagttcacaactccccgtaactccaactccaggggctcgaaccccttctcctggcctctgtgggcatgcagatacacacagataaaaataaaacacaaacataaaaggaacagatggtgggttttgcacttgaagacggcatgcagctggagcagagcacatggagaggggtgtgtagctcagctattctggaatagacacgatactaagaacacgtgttgggggcgtgcagagcctcatggcagctgagaagccactcctcagaggcatcaccaggttctgaagccatgactttcaccttagacgtccaggtcccagaactaggagatccaagttcccactgttcacaaaccccccagtgtgttcaacggttctccgtgacctcagcaaacctaccccttctacatcagtttgcatcagcacatggttttggaagtttgaaactgaactatcccttttcttaatgatttcctgctatgcctacttaagcctgtcacatgactcttttggtctttcatccgcattgcatcttaacccaggctttgtctcgcctcctccgaaggatgtcacagcctgaagtttccttaagcatttgctggtgggcctgaaaaaatcatgaccaactcttagtttatttgtggttcagtgatcctggttactcagagcaaatgtaggagtcatgtttgattcagagagagaaaaaaatcatatatctgtacgggtctgactcagaacagacacatttatttagagattatcaatttcacaaacaccacgggtctttattatgagctcagctgttcagacatgcctaaggcacaccaccctgcaggttagcatcaccgtggattctcaaagctgctgatgtgcttcaagaacagacccttagccttataagggaaacagctgtgaagggtgacagtgtggtggacccagggcggcaccgaggccagaggggtggtccagtcctgtaaggaaactgccaaatatccctgagaagggagctgcaccttcttaggcctcagtttcctttcctgcaaatacaggcattgaccttatttcctggctctgcagttttccagcttcagtgttcagagattcaatcctcggtctaactaccaaagccaagaaaatcaaagaagccatggaccctgttgacagccctggtcttgaccctccttgctgtgagggtagggtatgcagccatcagaggtaaggctgggaggcatagaccaaacctcactggactgctattattccctactttcagttcactgtgtgaccaaccacctttgttctgagctcaggaaactagggactgtggtagaaactcagaccagagaggcaaagaaacttgcctgcagggccacagctgtatagccagcaggaggctgagagagggcgattccaggcaacgtggctcaacagctgccctcagaggttagggtagcagggctctatgcaaggagtctgtcctcatgcctagggccctgagagacaccagaggcctccggccagcagaaaatatgctagagggagagcaggaaaaggtttttttttttttttttttttcctcccagggctgcccatattgacattgcagaagccctaggacccaacaggcatttcttgaccacttcagtgggaggctgtcttgctgaaaccacctcatgcagattcctggtacccatgcaagccaccaaactggcaagagagggttggtttggggaggtgtagggctagaaagcctggcttcatctggccttgatccaacatcagtgggatttgtgactggtcactactccctaacacatgcagtcatacatgaactgggatgattctacctctccacacgttccaggcctcaccacctgcctcttcctccacaccatctgtcccacaaagggtcccactctgtggaacctagcaatccctcctttcctttggcttctccaagggacaggaactcagtctcgaccctctttgtcctcttgccacctcacattgtgttttctgagggaataaatggtgcacctcctcacactaaatgtttaacttggacctgggaaccccctgagacggtgctattgaccaggatcacaaggtaaacacaaatcagcttcccaggaagctgcactgccatactgtttctgaaaaagagggcttagtgagttagtcactttttaaaaaataattatgccccgattccaaagaatccggtctgcatttcactctctaggtatttcatatttatgctatttcatagtatggctcccttctgttcagagaggggctacctttgccctggcactcactctgcctccacagtccacctgctcactctgcttaggaaccttcccggcttccatttcctcctaaacaccattgacttttgatcttggagcagaggggtgtgcttttattagattcaatttgcaggaaggccccaggttccctgcgaatcgagccataatagtcaatgaataatcacagggctcaggcaagcttcagtaactaggaaaccacccaagaaaatcgagggggaaaaaaagcaatcagaaacggtgaatgtgtatccgttatgttcctaagcatgtacctgcccaaggctgaggtagatcaaccaccaaactggccaggctagaggatgcttgagccaaccaaggactccttccccagaggtcaacccaaaaggcatcccaggtctgttgctgttactttagatcaggttttacatacttggaaccatcagggctgggttgctttccagaatgccttccttcatttccacgagtgagacaccttacccccccccaaaaaaaacatcccaaaatgatcaccaaggaaagctcagaagcccatctttaccgagccttctaccttgccgatgaattctaagttcatctcagagactaatcaaagtttaatgacacaggtgccgttacactcgtgtgacaacttcttttgcagctttctgctcagtgttacagtgctgtcttccaactgtcagcctgagaggccctgaaaggcgtcttggctcagggaggccctgggtgagtaaggaagaccctgggcaccatgagtgcccacagtgtctggagcacaggtgaaggaagaaagtggtcctgttgggatatctgagtttcaagagatcagtatgtgagtgccaaggttctcaggcacacagtcaaggcttgagaatatgcggagggaggccataggtcaccctccgtcagctggaattgaagtccagataaatcagtaccttcggctatggttttaaaaaaaaaaaaaaaaaggtaacatatgctggtccatgtctccatggtaacggacttagggaatctgtatccatttatggagttccccctcctcgacctgggttctctgacccagacctgaacacgaactgagaagccacgaggaaatatcgattccgtctgaacatggctgttttagcttagtggattgggccctgactcctgaaaaggtgatacaccagagggaaatatcaagtacaacagtaactcaattggccagtaacttctgatggggtgttgccatggaaaccaggagccctgagtaccagggaagctgcggccttctactcgcttcccgataaggctgtccttggaacgtaccaatcgtcagtctcatggccttgccgaagctagacatgtgcaattccatacgcatctctggtatccacctaaacttctctactcaaccctgaacacacacctgcgcccacagagcaaacgcgcgggcttccagccgtgaacttgtcactttgccacaaaaagggaaactgccctatggccggtgcttttgaccatgagttcgggagacgcactctggacttggcatgtccttgacctgatattaaagtgtaacaccaatcaatgccttgatgaattagtaaggctggtgctcagccaagtgagcgctaaggctcggctcggctctagggggcgccatccccaccgaggcggtaggaggggccaacccagagccgagcggctacgccacgttccactcttccactcgcgactcggccacccgcctactcgtttgcgcctccctaacctcacgtaagagtctcttcatgacggaaggaccagagatcagaatccgcacatagttccaagcacagggccggctccacggcggaagcctcaccgcctatcccgcgtgccaccggcgccacccgcttggatccggggacgcaggagggcacggccctgcctttcctgctgacctccagggcgcacggcccgagtcggccccgggagcagaggccagcaggcgggcaactgcgggcagaggaccgtggggccgcggctgccggagcgcgggtctcctcccacgccggcctccagctcgctcctcctccccgctctctccgtcacccctgctgtcccctcccccggtcccctccggccctcccccagctccagaagagcgcgcggccgggacaccaggctgattacttcctccaccgcggcgctgagcacggactggacgccgccgagtcccaccaatccccgccgtcgcccccggccccgcgctcccggatcggccccgcgccctcgcctcgcctcgcctcgcctcgcgcgcccggatcaccgcgatctcctctcacagccgccctccggccggccctgcccgctgcggcgcggtaagagcaagagcggccccgtgtgcgacggtccgcgggaggaactccgcccggggtggggtgcggtgcgcgcggatggacggacggccctgctccggccggtcggcaggtcggcaggtcggcaggtcggcaggtcgggcgcgcgtcccagagccgctccggctggttctcgggcacccagtggcctcggcgagggacccgggcaccgggcagggcgtgtgcagcccgcttttgttttggggaaaaccagtgcccgcctggtgcggttcctgcccggggcgcgcgactgcatttctccaggtggcttggcttgggggacccgaagagggtggccgcggtggccccaggatgggagtgacttgaggcggggaggcactaggcctgggaggatacgggggtgcccggcgcctgaaacacctgggaaactgcggctcccaggaacgtgtcacctgcttggctaggtttgggcccccacccccctaccctccggccctgcgaagccagcacaggacagcgtcccagaggagggtgcgcatggctgcgctgcctttatttatttctccttaagagtatatgaaggtgtcgtgtgtgtgtgtgtttcacctgtacttatttattcattatttaatctcgtgagatttatgctaacctgcactaaatttcagcggaccttaaaatagtggttggctcgctacttatttaggaagtaaagcggtgagcaggcctggttggagacaggagtcacttaattcaccagttaagagatagagagagagactcgctccctaccttatctgcctgcccacaccgcctcggatcgggagatacatctcagtgttaagcttttattaaaattctgagtaatctcgcagtacagtaaatgtgaacaccgtgcgccccacagggaaatagtctaactctcagatctggaattagtcatccatctccctaaactgatcgctttctaagcgaaaagcaaaccgaccttcaaaaggttttgttcttccaaaaatttacctaaatacagacctgtgctctcttataaatggttaccagttccaacaaggattgtttgccagtgaaattcttgttttaaaacttcacttctcagtcgttaggtttccatcatttactcctgctctttttattttttttttattttttgagtacacgtagcagtgagtcccctgagtaccaaagagtctaaacttgaaaattgatttatccagagtctcgacttgtcccaggacttagcaagcacgttcagtaggataaatgaacctaaatttgattagccgtgtgtctgcctgaagccatttagtcaagtgctttaattctacagggtttttttttttttacaaaactcattaaaagccgggcaacaaaggaaccctgttctgcagctggtaattacagctctttatgtgggagtgggaacctcccttttctcctcctgtttgtacacaaaaggcagggaagaagttcttccacaaccattcatccctctcagaagctaaaactcagaattaagtacgcaagtatctacacatcggtccacagagagccctgtctgacagaccctggagggactgtgtcgacgtttctggctctctgattggtctcctgcttgaggcttgtgttcagtcaacaggttacagggctgagtccattaaagtaggccacacgaagttctcagtagtcgagcatttcacagggctatgacaagaaggcctgctttaatcacatttgtgtgctctctgcttctgtgggatgtggtagggagagcccagagccctgttcacctgaggtgtaatccccatagacaacccagtagaagtgtgtccccaggacagtgactcggtgtcagctgcctccatggtaacttttgggacctggacataggaggattgagggggtgggacttggggcttcattgacacggggagctcggcattctgtcgtggtggcatttgtttgtaaagaatatcgaatccttagtggatgtggctgagatagtataccaagggagagtctgaacgaatgtacccactgtggagactggacagaccctgccctgactccttccagaactggctggtgttccttcaatgatcctcagcctttgtgagccattataacccaaatcctcatatctgagctcccaacagcctccccgaggacccctttccccccttgttgccttttaatcaaggtgtgagtgtgtgcacgcatgcacgcatgttggagagtaagaaactgttaggacatctgcattggccataatgttgactctaaacagaacacgaggaagaacaatgcaagttaaatagttctctgaggaggtgctgtccgctggctctatcaagttctaccaattgcacactaattttagtgagtgtttgtttaacaggcgggtgcgcacggaggagagcaggtgtgggccactgtgggtgacaccaaggacctgctgaaggctccccatgttctgtaccttggagcctggagggtggggagctgccggcaggttcagtgactccatctgtttacagctctggtggtattgttgaaggcctccttacttcatatcacttggttcgacccataagtacacattagggccccaggaaaattttcagcccactgcaagtcacatttttgttttccagcacgctcaaaagcagtcttaacaggccgaattgattcgactatagtcagtagacctaatgtattcacaacattatgtaagcaccaagtaaatattcaaagtaccgagacgcttttcctcctcccttctagttcctaagacctcatgtgtatggccgcctcccttcacaggggccttgtcactgccagtagccactgcagccagctggtggtcagcagagctctggtatgagcccctattattaaagcaaggcctggcttcgggaaggggtgcaaaactgctacacacatgaagtagagaagtcctgaggtcacataggcagagcctgaggatctgcgatgatgaggggctgggtcactcagggtcatgtgtttctgcatgtctccaagaagaatggtgggaagagggtgctctggtgtgacccctgcgtggcttccattaggtgctcaggttgaatctgactgccctgtgcagacaggaggagatgctggcatgtggccctgcttggcaccacctaaggcctcacctcagctgcccatagaagtgctgctgagactcctggcgcagcctccttgctctgctaacccagggtgtggggacagcccatgaagtgagtctcacatctaagtagagctctgtagggcccccatcccaccccacgtggtgcgcccccactctccttgagagcgactttgtctggggcccttaaataagaattcccacatccaggcgtgtggaatactgctgactttgtgttgcacccacctaaatattgatgtcaccgccaatattacctttaaaacgtgcttcaattgtaacccctctaactctgtctcgtttgcttttttttttcttcaagatgaatgatttcgcaatcaagaacatggaccaagtggcccctgtcgctaacagttttcgagggacactcaaggtatgtgtgcttcttaattaaaacttctcttgacaattttagaaattccatcgataagagggggaaaacccatgttggactgtgtcccagaaaactggttctggtcccaggtttttacatatcttacctgtgtgactctgggggaaattatgtaatcttctgggcctccgttttctgtactgtgaaatgggtatcaccatgctatttgtacctgccccgcaagatatggaaaaacaagccctctgagtcttaaacagttggagagaatgtgtctgccacctttttatgcactcaggagtttccatggctgagtgcatggaaacgctacttactctttaacttctttgcatttatttatgagtgcctgtgtgcatataccatgatgaccctcatgtagaggtcaggggacagtttgtgggagtcggtgctctcttttcttccaccatataggtcctggggtcgggtcactaggtttgccttacccactgatcaatctcagcactcccagaggactgtttataaactgaaatcaaagagactaggcattcttgtgctcttcccatcaggaggagctgcacccatgaggctattgggaacctgctctctctggtgcagcagcagcaggcctatttatacaaaccccaaacagattaaaggtgaaagagctggctcccctgggcaaacacttttcacatcatgtctgtgagacattcttgtagcatgagctggtaattttgtgtgtgagtgtatgcaccagtgcgtgtttgtgtgctcacgtgtgtgcttgtgtgtgtgtgtgtgtgtgtgtgtgtgtgtgtgtgtgtgtgtgtgtggagtgagtgcaagcttgtgcgtgtgagtatagaagccagcaacaagtgtctttctctattgctctccactttattttttgagacagagactctcgctgaacctgccgctcactggctaagcaagactggtgtgtcaggctccaggagcctcctgtctctgctctcctggtgctaggattacaaaacagtctccagtgctggttcttgccttccctttatttgaggcagggtctcttgtcttctactgtgcacacaaaggctaactgagcttctggggactctcctgtctaccccctcttcccaggacactgggatgacagacagggtcccctgtccagcctcacgtgggttctggggatcccaactcatgtcctcaagcttccccagcaaatgcttttcctgctgagccatcttcccatttccctaagccgtttttatggttacgtgtctgatgcaaactccagaggcagaatctggcacccattattgttagggttagggttagggttaggcatccatttttctgttatagtgaaggcatcaaatcccagggtgctgggaaccctaaccctaatccttgttcgatttagctgtgtgtcttaagcacggcagaaatggtgtgcggaagtgtgacggagctgaagccacacacagccctaaggggggaaaacctctgtaaatgctgatgtctggattcagagaaggcattcgccaccagagtctatgttgaaattcttagcaaggctttgcattattctgtgacttcctggtttaaaaaaaagaacttccagaaagacacttcttagaggcctgagcatgcttttgggaagtttttttttgtttgtttttttgttttgttttgttttttgggtttttttgcctgacatttatttactatttcaccaaaaccatctccacataaagtccctggttcatccagtcaggtgcttcatacacctcagtgggcctgccctcctgggccgttggcagtcctggggtgggggttgaggattgagggctgggattggcagcctgccctcttgttcaacatgtcattcgctcttctgcatttctgaaatgaaggcacagcgctgagctgattttatttgtaaatgtgttacacatttatttgcccatgatgcaacacatgggtcattgtgttacacaccatgtggggtttccagatgatgttgggaaacagaacttttcttcacattcttaaaggagccgggcaggggcgggtcagcctcatcgtcggagcttatccgtgcccctcccatgcagagctgctgttttttttttaaactttgcatatgtgggatcacacggccggcctttgatgcttcctgaggctgtctttacactttagctatatacccgatttttcctgaaaggtgcctttgaaagtctgcctgtagttggtttgaagtttcttttctacaatcttttttttatcatagaaaatattaaggtgttttttttcccacagattgttattatctgaactgctggagtgatggggacgggcttctcttgattcacttaaagtagtagatacttcaaagtaactaactgtccaaagataacaacaccttattatcccttcaattccccatttctttctaggcttccctttttgttttaagtgttttacaccaaaacaccctgtccagtttttcttttcctatacacccagtctgatgagatgggtgcgggtcttctctgaaactcctctcagtgtgttcctaagattcggctgcttttagatgtatttagtttactaatttaagttgattatgctctgaagtaatctcccaggccatctgaccctgtggtattaactaaagactctagagtgaggtcctagaagtgtgctgccagtactgagaggtcattggctcatgttgcttcaaaatggctgatgtcatcagggctggtggtgaggtttgtggaccaataagaaaacacgtcaccccgtgacttcatgctgtgcctctttctcctccctgtgttctccagcgccagccagcctttgacacctttgatggttctctgtttgctgtgttcccctctctcagtgaagagcagacactccaagaagtgcccacaggcttggactccgtctcccatggtaatttgttcctccaacctagcagagatggtgcagagcttccctcagtagctgggttaataaagcatgatcggtttgtaaagacagatctttctcctgccaagagtccggatgtcttgagtatttggtatggacggtcttgatggaaatcttctcccagggtatgggagaagccggttttcctcttgtttgagtgaactggtcattgtggtgtcttcacatgctgtggccacctgtgaacccaggagctctggtgttttcaagcacttcctcatctcccgggtgtcttcttcaaatagaaggtagtggacatggaaatgtgtccaagcttctcatgctcagttcacatttctggttaaaacaccccagtggcaagtgcatgtacgtgtatacacacacacatacacacacacagagagacatacacatatacacagacacacatacatacacatacagacacacacagacacacatacacacannnnnnnnnnnnnnnnnnnnnnnnnnnnnnnnnnnnnnnnnnnnnnnnnnnnnnnnnnnnnnnnnnnnnnnnnnnnnnnnnnnnnnnnnnnnnnnnnnnnacacacacacacacacacacacacacacacacacacacccttttccctttgagttttgggatcacagattactcttgctcaccctagcccatttgtattttggtagtggttctcactgtcagtcttcattctattcaaaggactagcatgtcagatgcgtctctacaattacttcatagtcattgactggacacactccagattggtttgtcgtatgaggtgggtgttggacaacacagcctagaaagacttatcaaagcacccgggctttcgtaagcttggcctcgtcttgtagtcgtttatcatccctgagatttccgacagcaccagagaagactatttctcaacaaagttaggggtgtgcctgtttcacagcgcagtgttgtctgagcctggcacgcccccgtcccacatcacactttcacagtcaccgaaggcagccagggactgtccaaccttttggcactgcagtgtgacactgtggcctttgaaggccacactcaagaaccacacagtcaggttaccagaaaagcacagtctcatgttgtggatactctgtacttctgacagttttgtgccgcattcctagccatccttggctgcgtacaggacacagactacaaggctggacacatctgaggccttctgaaccaaaaccatacagtttaaaatgcttaaatatgatgtaggtagaagtggcatctgtatgtacctgctttatgaggctatacaaaatacagaatttgacttttatcttaaaaatttagcacacacacacacacacacacacacacacacacacacacacacaccggggactttgccagactgaattggaactcaggttaccctcagtaccctcctatttctgtctgccaaatactgggattacagctgtgtaccaccaaactcatttttattctggatttttcctaagaagcataattggttttgtctcttaatgtcattgtttactttttaaaaagaaaaaaaatatggcatgtcaaattacatctctgtgattattataatagagaatactttttaaaggaaaatattttcttgtttgcttttggagctttttggtaatactgggtatggaacccaggatctcctgtgtgctatgtgagtgtgcaagcatttagttgcaccctggccctacagctgtatgctgttaaagaatcctaagcttcttttgacgtcgccaccctggtcctgacatccctgtggtctctttccagattcagccagctgtgaactgcccttgctcacgccctgcagcaaggcagtgatgagccaagccttaaaagccaccttcagtggcttccacaaggagcaacggcgtcttggcattcccaaaagtaagtgcggggctttgaggctggggagtccctgaaagacatgtgtgagactggtttggccagctctgtctttaagatgctcctggttgttttgcaagaggtcacaagaatgcaggaggaatgtagctgccctgtacctgtgacctgtggcacacctaaccctgcactcactaaacaccaagtgccattcgtgtctcagaacatgcctgggtcacagcatggcagtgtctcattcatttcggaggggtttggagctgtccaggcttggtgaattgtagaaggccactccctgccttccagatactcacaagtgtttttctttctcgtctttcctgcacagacccctggctttggagtgagcagcaggtgtgccagtggctgctgtgggccaccaatgagttcagcctggtgaacgtgaatctgcagcggtttggcatgaatggccagatgctctgtaacctcggcaaagagcgctttctggagctggcacctgactttgtgggtgacatcctctgggaacatctggagcagatgatcaaaggtacagctgcaggacttggggaggtggggacccaaacagcaggaggtgtatgcttccacctcaggctgccccgtagtaagagtccctgcttcagaacacccccaagcgagtcaaacagggaggtgatgacgggtcttcattccatggagggaagtgtgtgcgatgttcacgccagatgtagccacaaggcaagagcctgagtcaccaaattgctggttgttgccaggctgcactggttgtgccagctcagagcaccttggatatgtaggccagccagggtgccatgtgagtaagctcactggaagagacaagagagacagggacatttgaatgtaaggcagcataaacagatcattgtggatttcataggaaaattactccagttgctggggattttggagttcgggctgtaactgatcgactggtacacatactgaaatgttaaggggaaacactgagctcagaaaccattcttgtctcagaactccaagatcagtgagacttgctttaaaagatacctgggtctaaatgagggacagttccaataagactaacttaagttaaaaacaaccaaagtaagaaaatggttagtgccatggttaaacacgtctgctttcaacagataaactcagaatctcatctggggttccattgccaggatggtttagttatagcttcctagagcccaggaaaactgactttaaggactcctgattctttgggagcatggactggcatttcccagtgcatcccaggggcagcatgtgtatttgtgttgcttggcttcaggggatggagtttgtgtgattgtgtgttcccagtaagggagcttacaagaacacacactttccctgtggacctcacgacatcccagactaacctgcagaggatgttaggcctcacgggggggggggggggggggggggggggggggggggggggggggcaggatccaagtccctttccttcaacccctgttttcccagccccagaaccaatggcttttcataaacatatgcatgaaattaaatgcttttctagacggtgatgtcattgattttggaaaacttatcccagattattagaaaaaaaaagtatactaattaaaaattttaaaaaagacacataagggggttgaaatcagtcagaatatgaagggctaggtgagtcactcctgtatgcgcaatgcaggatcgtggaagtactgcttttcttgtggagtttttaaagtgggcttgatgtcttcgtgtctgtttttcagagaaccaagaaaagacagaagaccaatatgaagaaaactcacacctcaacgcggtccctcattgggtcagcaacaatacattaggtcagtcaggtgactatttcttaaaatctctggttttagtctctcgagcccctcaggtagccctagacctcttcctggggtggctacacatgggtattgatctaccaaacagctgaaacatggcagattcccgaaatgcataatgggaatctaagagtctgactcatctccactaactcagaggctgtaaaatgaagccaataatataaactattcttgatgagttaggatactgtttatatattgaggtgaccactgataggctgaccagtttaatggaaaattagcttcacctgctccttgtgtttttagtgtggccaccgggaaacttagtcttgcttaagtggctcatgtaatctctaggagtcaacgctgttctaggctgttttaaccataaagaggaaaaagaagtcaggagacattaatgtagtgtaacacaagatgtggccacaagtgtgtggaagacagtcactgtgctctgaatttggcacccgggacacctgtctcaaaacagggtctcctaggggtgacccgcaaggtcaggtatgggtctagctgttgtgatgttgactttaacagctctgccatctgacccatccttgtgttcaggttttggcatggaacaggctccgtatggaatacaggcaccaagctaccccaaagacagcctcctggacagcatgtgcccgccgtctgcaacgcctgcaggtcttggctctgagcaggagttccagatgttgcccaagtctcggctcaatactgtcagtgtcaattactgttccatcacgcaggacttccctggcagcaacttgaatttgctcaccaatggctctggtaagaggacactctagaataatgttgttggtttatcctagaagccattcaggatgagagatggttggtaaggacactgtcttctgccattggagaaggagattaaaggaaagggtcaccttccgtgtgactttccaaaaaagcacaaccggtatgaaatcctggtctgggttctgtaggtatctagagagcaataccgaatagcataacaactttaagctaacttcctcacagtggagtatactctgttggacacatgggagtgtgccagattccagtttaaggtccacacatctgacacggctatgtacacctgtgttacagccattcatgtggaggtagaaatttctagctctccgtaaggttccttcctgtcccttcccagccctcttcactagagcaaaccatttgactttccatcatacagattgggttctgctgttctggggcttcacacagatgggctcctgctaactgtcttctttggagtttgtctgcttccagccatcctgttgtagcgtttgttccttctcgtggctatatagtgttctacattttgtccatgcttctgttggaggaaggtgtgatgtgtacgtaaccttgtcctgagagattagcactgagtttaaaagcactcagggatctgaaggatgctgtacctgaggtccctatatctgcactgggggtagctggcagtgatgcaggaattgggaccaagatgcacttgaatccatgatccaggggcactggcccttctcacatcttggaggggtctcagcatgtgtttggttgctttttaccagggaaacccaaggaccatgactctccagagaatggtacagacagcttcgagagctccgactcgctcctgaggtcctggaacagccagtcgtccctactagatgtgcagcgggtaccttcctttgagagcttcgaggaggactgtagccagccactgtgcctcaataaaccaaccatgtccttcaaggactacatccaagagaggagtgacccagttgaacaaggcaaaccagttattcctgcggcagtactggctggcttcaccggtgagtgtgcactcagggccccagcgggcttctatgtgactgcaatggccaccatgctgctgtgacactcttctaagtttggctgtgacactcacgctctggggttaactgtacccaagtcccacaagaccaggcttgcagaagttttcatgttagggtctcagggggtaggaggagaccacaggccacatcctctacctgggacaggaggaggaagggtgagagagggacggatgaacagactggtcctggttctgactcatactctggatctccaggaatgtaaactggcctgggaagggtgggagctggctcatgggataccagcactatttacctctcttgacctcctccaaaaccatctaagaggaggagagaactcttctgggcagagaatgaatcttaaagctgtttttagaaccagacaatttcaaaactggggcaaaaataccaagaatgttcattttcaccactatagatgcctttaaataaaccttcttctcatgctggccataagaagccactatggattttaaaagaaaaaaagcttaaaaaaaaaagattaaaatgaagatgtggattttctttttcattgtcaaaaacaaatatatatatttacatatttttgacaatgaaaaagattatatatatatatataatctatgaacctaaggccattttgatacctaggaatccaaagaaacctgacagcattaggagtgtctacctggatggttatagtagtactgtttgttgggtagcccagcctgtggcctgtggtgttacctcgggtagtgtggagacgcactaaggaatatcagttcagaggtgacaagccctagtggccattgaagtgagtcagctcggcctggccccatctgaggtctttctgtccctccccaaggccttttcacatttgcagacaaggtgacagctgggcttagggacagacctcagctttccttctctaatctgtgatagggacccaagacaagtcactctcccgagtacatccttaagaaaggtgaggctgcagcaagcctcctcctcctcacaatggtagtcctgactgcctgtggagcaaaaagacagacggctgtagatacaggtcacctcgtgagtgtggcatgcagccaggtctcacatcaaacagcgatgaatgcctgtgatgaaatgacccttaagtacccaccccagccccactgggtctttctagaaataaaatttttaaggtgctggaaagcattaaaaaggcaggattggtactgatgagggctggtgaccctgtatcctcctcccagaagacaaagacagcagccaaggaagagccttggctcagccatcctcttggaggagtactgggtagagaggaggttactgtggcttctgtccgttaaagtgcttccctgaggcgccacctgttcgtccatacagtccctggtggggtccatgttttcaagacagcctgatccctgggagggtcaggttccagctgaccttgaagaaccctctctaacctgcctccctttatccccaggaagcggacccatccaactgtggcagttccttctggagctgctctctgacaaatcctgtcaatcttttatcagctggacaggggatggatgggagttcaagcttgctgaccctgacgaggtacggaccatttgcaccctcaaccccagtttgggttctaaagctggccccggacacagggaaagtcaacagaaccagcaagagcccttccccaaccaggagctccggctctggggctagctgagccgaaggacgccactcgagggcttgttcatgaatgggcccagtgtcctttgggcagtgccctccctccatggacattgtccgtcacaggttctctagttaccctcggcaagttctagcgggaattcacctttgtcccaagttggacaaggcacatagcagccaaggagccttcagggttggccctgggtccctctgctggagatggctttggtaaggcatgatgccagcaatatacataacgtaatctgtcaccctctctgtgtctgggggaataagcatgtctcatgcatgagccagggcagtctttccagctgtcacatggcttggaacgtatctcagttggcagagtggctgcctagctcgctcacagccgtagcttctagccccagcaccaccagtcaggtgtcatggcaccctcctgtctgtaatcagcagggaagcagaggttggcggagggtaatgaccaacctagggttatgagacgctagctttttaaaaggggttgggggggggggtgtagggcagtgttgaaataagcattatagaggatggctgacaacagatgaccctgtctgggacacccctggttccaaatggttggccccaggagctggaggacagggggagatggggacatccctggcccttgtacagagaagcatctccacacatttaaagtgacccagacatgtccccatgacttgggtcctatagggtgagcatccagggtcaggggaggcaatcaagattgacacaggtgactctgacctttctatgtcttcccaaaggtggcccgccggtggggaaagaggaaaaataaaccaaagatgaactacgagaagctgagccggggtctacgatactactatgacaaaaacatcatccacaagacgtcaggcaagcgctacgtgtaccgatttgtgtgtgacctgcagaacttgctagggttcactcctgaggaactgcatgccatcctgggcgtccagcctgacacagaagactgaggtccttgggacgaccttgagctggccccgggcccggggactgagtgggaagcctgtcctgacccactgctccaaagacccttgggagggcaggatggaacccctctgggagctgccaagcagcaatggcctcctttcattccatgcctcttccacaaggccagttccccagtggtggaaggtggcatggcctctctgtcctgacacaagacctggaagggaaggggctctgggaagccaccccagcaccgagcaggctgtgtgctgatcacagtcattgaggctatttgagatgcgccagggagctagcgtgtggtggatgcacaaaccctgaaaaacattgtttttcctttggccttttgccaccaggagtagcaaatgcaaaagccacctcttgagagccagctaggcaggtggagagcagcgactgctccatttcggaagtcattttgtacatattattgtatcttataacgtcaaaatccgccaaccgttctatttaacagaaattgtatattgtatttaaaagtaattataactgtgtttgaatcaagaatgcagatacctggtagattttcttttctttttttttttcactagcacctaggaatgtcattttacacagatttaatctctcaggagctaactgagagaaatcgtaatatactgttttcatttgattttccaacaggaatggggtctgagggatgacccctggtttttacttttgtttttgttgttgttgttattttagttctgacttgctcattatctggccaggactttgtatattgaggtttgttttttttttttatataagaaatttaatgttattatttgagggtgcctcgggcctctccacttcctcctggactgtaaagtaaaagctataaagcagtatttttcttgacaaatggcacatgttttccacttctctgcatgccttaagtcggtttctacacaaatgtattttattttttggcgtaactgtgttttccagcaactccccctccccctagccagtcgtttccttccttccttcgccccaaggtattctgtgtgactacaataagaagactatttttggaaatctatgcctccttttcagagatcagaagggatttatgtagcagctatttttactgcaaaagtaactcactggaaaaaaattgtaatttgtacgaaagctttatttttatcttagctcatgtaaagggaaatgtgttgggcagggctgagggtggtcaggagggatcgtccatcagccttgaccttaaatgaagcatggcgcgtcccatctccctgacctgctgtttcttacatctgggccgcatgtgcttctttctgctccatgtcctcagagagttgactcctcttattttcttggcctcggatacccaggagtacagacagggcaagcaagatgggaaacggcgtggagccgcttgtgtgatgttcttatctggtgaagagctcaccccaccatgagaccccaagctttcacccagtcatttggtttcaaaagtgggccacagggtttgccattcgccagcagggtggcctcagggccagcaggtgacatcgataaagagtcatcaaatcacgagacctcgaaatggacacaagaccagctgggacctgctgtgccagtcctgggagtcttagcctgcagattgaatgctttgcagctgagcggaggctgcctttcaaatgggacctgtgtgtatagacactgggacatctgtctataatgtaaacagacatgggaccagggacatgtgcctgtccaaagcttagccaacacttcagtttatatgcagttgagccacatgaaattgccaagtttaacctgagttttgtcagccaagagagaaagctttacatggttgaacctaacagttatggaagtctttggcgtggtcttgagtataaaggttttgtgatttggccttttcctcctcaaataataaagtgtttggtttatgccaatgcctccttgtcatgttggctccttggaatatttctccttccccgacccaacccagagacggcagatgagaattctgtacccttatctacacaacctggaagttcagtctatagcccttcctcaaggaattagaagaaaaaaatctatttcttgtgaaaatttatctagaaaaggatgagactagaacaatcagccttgtatacatcagaattttggaggaaaactttaggaagctggtgtttaacattagaatctgaggtagaagcaccttggtcatttgaggccacagctccagtcctcactggaattctgatggtggtaagacaacaaaattggctcttggtcacagaatgtgtgttctggctcccaggatatttctacattctagaatctgaaagtatatgctaagaagcaggccacacccaggcctcacaagtttcccaactgcctatgacagtgctgggaaaaaaaagatagagtcagcagagggtaaaaatcagtgtctcacactctccagggagctcatggcgatcaagcaaaccacaattctatccatccctaattaccatcttacaaattaattttaaaaaattaagtcaggagactgaactagactcccttaatataaatggcaatggtgtgactgggacaatatatgaggccactggcagtgggtccaagatctaactctaatgcacaacctgactttagtggagcccattctatatggagagataccttgcccaacctagacacaggggtgtgggggtggagaggtgccttggtcctgcctcaaaagagatgatgggacaaacttagtagacttcctagaggagactttctcctcctcctcccgaggggcagatgggaggagaaaagggagggggaactgggattggaatgtaaacaacaaattaataaaaaatttaagtcagggctacagaggtggggacagctcagcagttttggtacttgtttgttgctcttgcagaggacccacctagaagctcacacctataactctatttccagggaggtctaacactcccttctggggcagtgtttctggggcaatgtaagcatatgatgtacacacatgccgacaaatatagattttgttcattttgttttttgagatagggtttctctgtacagccctggctgtcctggaaccagctcttgtagactaggctgacatcaaactcacagagatccacctgcctctgcccctccctcaagtgctgggattaaaggccacccagctcaaataaaaaatttttaaacgtttataattctcatttcaaaatcatacattgcatattagcataatagcactttataattttttgagtatattatagcattgcttcctatgtttgcaaatctctttaatgtctgggctcttgtgtcttgagtataaaaggaaagtcagacctaacatgcagcattcacgtatatggtaacaagaggagaggttagctgtgactgggcaaaggcacacagtaggcttcctgttactgtgttctttcaaatcagtctatcttggatccttgcccatgtgtcattttgtaacctgcatttggaaaatgtcacttcaaatgataccacaatttagtagacactgccaaagggttactggacttagtatcactgcccaactacagaaaagctccaggaagattatcaggctcacagtgacatatacaaattcttaaactttgaaaattcaaccctttgtcatcaccaaccatcttttcctaaattgttaactttgaagtgccaaacatgtctcatttaattttgagaaacaaccagccaaatatccatggtaagatatagtttgccaattgttctttcaggtaaaaatcttatttgaatgaagtggttagtttagctggcaactctaacatggctgtccttcttttgggacagtcaccacactttattcagaatggagcagacttctgtctcagagaagttaaaaagatgtctgttctgtgagaaaatgattcttaactgccatatcaaatacatttttatacatgaccttattcttcacaatgtggtgaagaaagcaatgacagtcagtctgctctgacctctgaagaggcaccagcagtcttaataatctttgtgtttgcaccaaggccaatgtcaacacagtaaaacagagtaaacagattagtattattatataactgtatttgtcttaagaataacagtgagagccatctcagaaaacccaagagcttgaagaccacactttgtgagccattctgaaaagcagacacttgcatagaacaaagggatagactatggcaggggcagtcagttgagccctggacccctgtaacccagtgtccttgtctgcaccccctccctccatagttaacaaggactcgttttcacttaaacaaatactttcttattcctccttgatgccacactctaattctaaaccttctaagaaaaacaatggattttaccacagatttttgatagttctgaatcatatcgaattgtgattatctgtttaatgaaagtctcagttttctgtcactaaaacaaaatacttgagcttatttatgaagacaaactgtttggaggtgtcagtccatggtcagctggcttgcttatggtgagcaagtgcttcatggcatctgctttgggcacagcagagctgcctgccttgtgaccagagggcagcagagaaaattgaggtgtgctctctgtgatctgaggacccctgaagacttctcaccaggtcccagtggggatcaagccttcaacatgtggacctttgaggacattcaaagatggaactgaagcaacatgatatgattcaaagaagtatctccaggcctctcatgagatggccttgcaggttaaagcacctgcttcccaaacctggtgacctgagttcaatccccagaacccacagcaagagagaaccaacacaaacacacacacacacacacacacacacaattaaagtcttaaaaacctttgcattgcttccctgtgataccaggaattgaaaaacagggtcctgtgtttgccaggcaagcactctgcactgagctgtgtctcctgcacttgagtcatttaggaaaacatttctaggctcattctgtccgttttaaaattctattgttttctttaaaggtacaataaaaatgatgtgtagggttttttaaccacgtgactataaaatatctactccaagcccattaatgaatcaacaatcctttaatacaaggtaattaatcatttgtgaagattattatcaattcagatgtcttatacttgtgactgatttcaatttaatatactttttaaaataaaatttacccccaaaagaaaggaacttatatatgtagaaagccatttttttctttaacatgcttgcttcattatatgagaaagagagagaacatgaacagaattcatggaagtctgaaaacaatgaaagtctcagttttctgtcactaaaacaaaatacttgagattatttatgaagacagataaactgtctggaggtgtcagtccatgtgagagttagttctctcacttgtgagagttagttctctccttccaccatatgggccctgaggatcaaactcatcccatcaggcttggccgcaagcacttttatccactgatccatttcaccagcccctcatatttttcttagcatattcaaaactgagacctggttgaggtgagcagtgtagcctctctgtagttgttaactgaaccagaactcaaaatcagggatctgcatcctagcaggattttgtggccacagaaataacaacctgtgttctggcctgagggttccctccaaaatccgcattgctatttgcttctttttgtgacagtagtgaggactggggtgttctagaggtgaggagttcttagggctctgcttacatctctaccagtcctgtcctgtagtgatacaccaagaagaccctcagaggataccacagccttgatgctgaatttctccagaacagtgagaaataagtctgctttctttatgaattgcccatcctagattctgttgcaacaacaggaaatataaaaacataaagtaagaaagttttgttcatttgggtttttgtgacaatgtctcactgtatagcccaggttatcctctcactttgggcaatcctcctgccttagcctcccaaatattgggattacaggcatgaggtaatcccacacttggctctaaaacacagaggttgaaatcatcaatactccctggatgatggaagaactttgagtggtatcaccattccggatttacatgtctgggaattgatcaatgggctcaaatcgaagacccagacatgattccactgacctaaagacacatgatttttggcaaagaagccaaatacactggagacaaggcagaatcttctaaaaatggccttagccaaaatacatagctgcacaaagaacacaaacagatccacatctgtcaccctgcacggaactcaactccagagatatcaagaatttcaacagaaacagaaactgaacccctgaaactggtaaaagagaaagtaggggggtgatagccttgaactcattggcacaggaaaacactttctgaacaggacactgacagcacaggcatcaaaacccaacaactgataaatggaacctcaagaagctaaaaggacaccatcagaaaaagcggcagcctgcagatgggaaaagatctttaccaattaattctacgtctgctataaagttagtattgagaatacaaagaaaacaacccaactaaaacatggagtacagaactaaacagaattctcaaaagatgaaatacaaatgctgagaaacacttaaagaaatgttcgacgtccttagccatcaggggaatgtaaattaaaaactactttgagatttcactttaccccagtcagagcacccaagatcaataaaacaaatgacagaaatgatgacagataaggagaacacttacctattgccagtgggagtgaaaacttgtacaaccactaggaaaatcagtgttggatgtttctcggaagactgggaatcaaatctaccacactgtccagctatgttactcttggtcacatacccaaggaaccctgtgtcttagttaatacagaaatgcttgctcgtctacggtccttgctactctattcataacagccaggactggaaactgcctatatgttcatcaatagatgaatggataatgaaaatgcagaatatttacacaatggaatatcttgcagctgttaataaaaaggaaattatgaaatttgcaggcagatggatagagctagaaaaaaaatcatcctgggtgaggaaatccaggacaagttatcatcttttcttttatatgtggctgttatgctttaagctttagatatgtgtactcaatccaaataaccacaggggataggtagctaataagagaacaggaggggagagtcttccaaggaaggggaagtagagaacagtgttataaagagatagagggaaacgagggaagagaaggaagcaggacagaggagggctgtggggagcgacagctaacactaagggccatttgaaaagtcgtatggaaacttactactctagaagctccctaaaacacgtacatctatgaaatgaacttaaacggagtcactacataatgggcgagacaacgccccatcttatactaccaagtggaatctccagtgtgaggaatgggtttcatcttgttgagtccttgtacaaaggagtcccgtagacaccccacccccaccccagatcacaagatgttgcaaaagctaccgggtgctctccacatgatggtgaggccacactggtgaagagacaacttaacgtttgtcatcagacatggaggcatcgagcaggtgccctgttagaagcttcaccctgactgactagcattcagggtactggaagctgctctgcacactgccagaggagaaaagcaatcatcagtattacccagctacaaatctttcgcctacagcaacagcttgcctgtcggatacattagtgcaacagtggcacatatgttatgggaacaaatgagcagctttcatttgtgtttttgctttattgaatttaaggctcactccatggaatggagctcatatatgacaattgctaaagtgatcaagagactgaggctatattgatcatgggcctaggaaaaagcaattactgttactcttctaaaggaccttagcaataaaatgcagcctaatgaatggtatgtgtctaaagccacagatcagaacgtttctcagccctaatcagagacactttttcttgcaatagatgggaattaacagatagatacccacaactgaggcaatgtgcagagagtaagctgcctttatccaggccttcctgtcaagacccagggacatagatagaagcagaggtggaaagattttaagagccgggcactcgaaggaaacagtgtcttccagacagcaggattgatacaaataaattcacagggactagatgatggacaggaggtaggggggcaagactaattttctccactggggtgtcactggatatatgagccacactccagggcaggtcccgtgtccaggagtagctgaccaacacaaggcagactccactggtttggtttggttcttttgttttggatatttttgtcctattggctcgtgtgtagtgtgcgtgtgtgtgtgtgtgtgtgtgtgtgtgtgtgtgtgtgtgtgtgtgcgtgcgtgcatgtgtgtgatgtgttgattttgcagttttggtgttttgtttttgctttgagagaaagagcatgaagttgtatagttagggaggcagggaggctctgggcagagtttaggcaagggggaaaagagtctgatcaaaatatattacataaaatgtttctctttaaatgaaaataatttattattattatttaaagggattattaatactgtcccagatgccacacaggggctccttctggctcccagttcctctatgcacagcccttggtttgcattttaaattacccatgacctcccagtgtcttcatttgtaccagatgctggcctgtcagttccctaagaccaaaacagaagggtgagacccaaagctgagcaggggaaacccctggttgtgaaagcattttgtaactcctgggtggagctcagtcatgtgagtcctgcctgaaatctgacacttgggaaagaccatttttgggcatagctggtgtgatgacatctttgcaactggaactgacatggtttttgttccaggctctgtgagtaactgtcccctccctgcctcccaagccacattcaggtggcacaatggcctaggattgccaaatacaattcccaccagctgtttccatgagtccaactttaatctcctcaaacgcagaatcagggctcatcacatgatcgcatgatacagcaggggtccaaagtgtgtgctcatgaggtccagtgggccagagtgtggaaggtggcaggctagacagacagcaaataaagcatgagctctggagagaaaggggttgtgtgtcagcttcagtcacctccgtttaaacctggcagtgagaaataccttccagttaattagtgactgcagcagacggtgccatctccaaagttcgctttcatctgccttcccatgtatacctcagtcaccctgaggttgactttaatatgcccattttgcagatgtggggattgaggccctagagaagtaaaaatcctgaactggaggggctgactcctgacccatcagtggctcctgaccgacttgtcatgcctgacctgtagatgatggcttggagttgtggagggatctgggtggcctggagcccagagcccctgcctcttctgagtatctagacatcttctcagggtggcagcctatctttttctgtccctgactggggtgctctgtcactgtcacaataaagcccccttacatctgaacatcaggctcttactcataatgctcaggccctcagtcatcaagtctgtgttttggatgagattgtaggatgctgggaccctgtcttcctaggccacccatggattccccagacagagtgtgaggcatgtctagaagttcggttaacttctgctcactgtgtctgcgttcacccatgagacatatggtcaccacagagaatctgaaggtgaacaaaagccaggttctccttcactctgccatgaagaaacacaggaggagcagaggcagctgggagcaggtaccccagggcttcgacttgggacccagcactctagtcttgtctatggttaaaggtccaaataactcgtttctcccggacagtgtgttttagggacagcaaggggatcagtcttgccaaaaactaacatggatgctggcatccatgctacctcagccctgcactgggagctaaggcttcattcggttctcaggacacatgtataacatatacatgtgagcagacaccagatgcattcatccatgcgtacacacgcacgctcctcatatgctaacacactctgttggtttcacattagctgtctctgctcctttagtgccacctccccggcactggcataaagggccacacacatgggcaacatttgtcttatcgtagttctgcaagccaaagtgtgatatgagggtgtcaacagtttggcacgttttgagacgggaaggattatctgtccccagctctttctctggtgtgcagatgccacctactttgcccggctctttgcttcctctccatttgcaggtgtagctgctcctacattctcctgctcattagaatgccacccacctgcatcagagccactgcaggggcctaatcctaatccaggtgcctctgtaaagatgctgtcccccagtccaggctcactttgaggttcattcagtgtgtacctctgagaggattcggttcaactcacatcccccaacactaagcaggttaaattcagcgtcagtaaccctggtcgtgtctgcactctggaatctatcttaaacatatattacaggctcaggaggctcttgctgtaaaaaattaacatgaaggatgtttacattgcaaagtgcagaaacaaaatccaatcagatctaatgctcaaatgaaactggggagaaaagagggttggaaatgcagcttggtgttagcggcagcgtttgcctaagctggagcaagcttgagtcccagaccaggacatgaaaggaagagcaggaggaggagaggagaggagaggggaggggaagaaggggagaggagagggaaaggaaaggaagggaggatatgggagaggaaggaagggaagagaacaggactggaaggaactagaaggggagggagagtagaggaagggagaaggctagactggaggggaagggaagggagggaaagggaggggaggggagggaaaggagataggaagaaaggagccaggtaaaaagagccaggtttgtttttttttaagatttatttttattttgtgtgtatgggtatttcaactgtttgcatgtatgtataccatatgtatgcctagtgttcagggaagaaggggacattggatctcctggggctagagttaaaatgactgtgaggtgcctcccagactgagggtgctgggaactgaacccaggtcctctgcagcagtgcatagtcttaactgccgagccatcactgcagccccaagagcggaagatgttttttaaaagcacacagacaactgataaacaggaaacagtacagcagttatatcaactgaaatatatcaaaacattaagcaaacgtgaaggggggctctaagtagccatccctgtggcctctgtaggcagggaacccgtgatcagaaacagctctactaagagtgagcctcactccatctggccagccttacttaggggagcagagacagacacaacagccctgctgggaaatgctagatgttgggtggatggtgccagggagaggggacgctctacttgagtgagctgtttccacattcccagtacactccatggccatgctactcttcattgtgtattgaaaggaacacgctgcttctagaactagctgacctctcgccctccagcccaagagaggccagtcctggtggctagggatttgcttgccttggagatgggatattctgccagttttgagcatgtagctggcctggaggcttcaggggaggggagcagaggcgtggaggcctctgagtttgggaggcctgttgccacagccaatgtctctcctgtgttcctagagtggctgtgagtgatcctactgatgatggtggggccagggtgggatgagacccacagaggttgtccagctatgcagccttgtcaatgaagagaccacacagtgtgctccgccttccagggtgtccactgaatcagaatgatcatcagaacataggagggaggaggggggcctagggaagctgcaagtccctctagagagcagaggtcctcgggtgtcccttacacatccaagaggtctttttcctgcaggaccttgcaggcattctgggaaaacaactggaaagcactccagccttcccgactttcccaactgatgttgcaaaatacatcttaaaagcatcaaagaacaagggaaaaataatgggtggttgagtaaaaatagcatgttgacgaaaaagcctagacacgctgtcaaacaagctacacaagaaggaaaagctcacaagtaaaagatcagaggggacttggagggaatggcgctcaccggatccccacgtctgcaggaatgaagccgagaggggcatctctgccatgagggagagctagggagagctggtaccctctctgtctgtcttagctaccttcctgttgcagtggtagaatgccctgacaaaagggagaaagggcttatgctggctacaggtcaagggtacagtccatcacggtggggaagtctctgtggtaggaacttgaatgacctggccacactatatccacactcaacacacaggctcatgcattccccttagaaaatgtcctggtacacaattaagatggatcttcccaaatcagtcaacacaatcaagactgccccacaggcaagtccaggggctcatctcccaggtgatcctagatcccatcagagtgacaattaacaactgtcacaatgtcccaagctttggccaagggagaacatctgggacaggctccaggctctgaagagcccaaagacaaattgctcagggactcctgcccctgtcgcttctctggaaaccgacagattcccagaagaaccacagtcccaaatgttctgaagattctggtgtccatccaggtggcattacccctcccagtaggggtgcatacacctgcagaccccccgcttggtcctagtttaactctttccgtttagctactgctgttggatggaccccatcatcccctctaactgatacctccattgatttccgcaaacacaagataccagaaggcagccagaggggaaatgtttgtgtcttgagggaggtggaaggaatagcatcagagcccaatgaggagttactaatagatggtgacaaccgtccacacccttattcctatcctcccattggctactgatgcttgggcagccattggccaggggaactagacacacaggccagaagagccacatggacacaagcatgccagcaaaggttgtgttagaaactggggctcacagcactgggctctcctgatgagagcctctgtcttacagcatcttccaccccagtcttttgaatgctcccactgagctcccttcaggccttccgctctgttaccaagaaggggatgaaacaatggagaaaacatccctggaggcctgaggacccccggagttgatggcattctatcaagtgcaaggttagatagaccgtggccacagtgctctgcagacattccaacagagtgatggaaaatggtgacaactggagaattcccaggtagtgacaagcaacctaaggtctaaagaacaggggcaggtagcctgaggtcatcaggggcctttgtgtggcagcttcttctgaactgaaacattccctccaggagggaaggagaggctcaatctacagaatttctcaatgaactcatgccaggagaacaaacaataataaaaaaaatccaactaaatccaaaaacactgtatataatttttaagtgttatatgaccataaggcttttaattttggttcatccattcatcaaagaaccatggattttagatactgccacagacagacagatagacaaggtcccagcttataagagcctcacttgactcaggagcaaggctgtgctatgaaggttccctatgggggatggggatggctttaagcacagtgtggttaggcctctctaattacagagatggttagaagagattacagaggtaaaagaatcacagagcacagagctggggttggctcaggaacagtgagctgacctagcaaggacaaggacctgggttctaccctagcactccaaaaccaaaagtgaggcctcacaccaggctttttggttgctggaaacagttccataggacccccagggacctttctcttctgcttatgatgaagtgaatgatttcattctgtcacatgctctctctataggaccatcaacagggccggatggtgggtagagccacctccctacaggaccatcaacatggacagatggcggatagagaaacctgtctacaggaccattaacagggatggatggtagctagaaacctttgaagaaactgtgagccaaaatgggctttcttctccttctaagttagctacctcagcatattggtcatcttttttattgttgtgcccatatacctggcacaggccacttaaggatttctctgcactcactgtttgaggacatagtccacaacagcaacagcaggtagctggtcattttgcacccacagtcaggaagcagaaagagaggatttcgctgctcagttctttttccttttgattcagtcctagaatccaccccagggaaagtgctgcccacactagggatagcttctcacttcagttaaccccatccagagagtcagtaactggcagagaaatgcaaatcaaaacccaaatgatacatctcctcccacaggttagaacagtagttatcaaaaagatcaaagacagcaagctttggcaaggacatggaaaaagcagagccttcacagtgtcatggagaaggtggagaatgtgaaccagctactgtaggaaacagcatggagcttcctcaaaacactacaaatacaattgctgtgtatatgattgatccagcaaccccacctgcattctctgtgttcactaattgggaaaaaaatattcttgctaccagctagaaatcagtcagaataaagacacccccaaccccacccatccaagtttattcttggcccttgaacctgcctgggtggactcctatcttgcaacagcagggtcacagaagtggaggaagacacaccttgtcccagtgcgaaccatatagaaagatctagaaacagcctcagaagaattcctctctgcttcctctcagaagatctcctaagaaacaggcattatgcgggagctttcagagtaggtaattttccatcatgagctctctttatttatgattgtccatcctttgttggggtcatttacaaaacattttcagtcttcagagttctgtggggagagatttttgtgcatttttatactcgcaaatgtctttttccccaagtctccactagttatatgggcccaggctgtcccagctgccaggaacacattccccctggaaacatgctttcccaactcttggtctgatgctgcctgcctccatctccagtcccttttcctgtctctgggacctgccaatccctatccccccccatcgagcatggcaccctagccagtacaggttctgcctcagaaacagccaacaagagtttgagtccagcacccacagccattctattccctttggctatcttgtttgagaactgagccgttaccagcccaaagacagaagtcccgagtcccaatggcacccctaaccaaggactccactgttcctgaagcccccatgttctagttttatgaattatccaaaccaacatgccccctggaggcttggcagttttctctgcattttccccttaattgtgagtcatattgacatagtttgtgctaattcaacagcgagaagtaagacttcctgtccagaattacagaccccttcagatcaaatgcgatgaggtggctaaggtgaactccatttcccaggtccagaggcagcagcatctccctctggaccgcagctgccccagcccctccctctggggtcacctgctgtacactgcataccctggcatttgttccttgggaccgtgtggactgggagtggttttgctttgtctccagaccttcccagggaatacaactgggcaaacggaaggctttgacctccgacccaccctctgcctggagcaggtgactttgccccatctcctgaagactgggactggaggagcagaaaacacagccacaggtataaaggcatggtaatggctttctattgctgtaatacaacaccacaaccatggcaacttagagaagggtttgtttgggcttacagtcccagagggcttaagagtcaatgatggcagcaagcagtaggcatggggcctggagcaggaactgagaaatcagtcttgaaccacaagcaggaagtagagagtgaactcaaaatgggacaaatctttaaactcttgacttccatccccagtgacatacctcctccaacatggccacacctcgtaaactttcctaaacagtgctaccaacgtgggaccagttactcagatgccagaaactatagggggcatttcattcaaatcatcatacacagcatcctcagggctccttgggcatcagcaccaagacaccagggcaggatggcagtggtcctgatgggtgtggtccagatgggtgtagtccagatgggtgtggtccagatggggacccatcctcagacacagtaaaagtaattaatgagggccagggtaagggcatctcctgagttcacatgaggctgagccacatctctgcttcccctccctcacagtcccctgacctctgacctccacacgaactgctgaaatcctattagctcaaacaaagaccaatctgaagctggttttgtatttggatattctttcctgttccctctgctgatgaaatttcaagtctgaatcataagattaggctgaacaaaacctgctagatgaatgataaaattggcgtgcaaggtcaatacttctcccagctcctggagcatttctaacatcatgtacggcccctgaaagaaaaccaagctggtgggtaaaggcatgaatcacctgtccccagacatgaaggaccacagagggcagtctccacatcggcccagtgtggcttcctgagtgagacctccactcaaaaccctttcttgagcttcctgaacacacaatctcaaaggctcagccatggctgtcagaaacccccagctgcaacacttgccttgcaccaagagcacccctgaaggccaggtgctgctgcagcagctgagcctgcccagtggccctgaacctacttgcttcctcctgggactcagcccgcgtgccctcattgaattgaaacccttccttttctaacacctcacaggaccccaaatatagggaggagaccagcttgtccagtcacctgtagccccctctgtgtgggatgaattgactctaaaataacctagaaccacgtgggagttagcaggagtatcatggaaactggagagggaatctccatggcaaccagctctctatccctctcttccctgttgcctggtccacactttctctctctagaacatgtggcctgagatttttccatatcctgcagcaacacctaacaggtctctgtagatttcagaattgggcaaaactaagcattgggtgctcagtccctgggctaagcaaggaaacagaaccccacaacctttctggagccagcaaaagaaattaggataaagtcatgaaggatgagggtttgcaccagcaggcgatgactggtgcccttattagtgagaaaatgaagtcatgaagattcacaaggatggagcatgagaagacaaagggcaggcaggcaggcaggcagaggctggagagggagggtagccccaggcacaaagcaccagtgagagacagtcccagtggaaccagaaagaggctaggagaggatctccaatgtacctcggctgggtttcacacttgcgggaaccagaaccacgtgtggttacggcctgatgggtactgtgtcacagcagtcacagggggctcatacaataccacaggggtgtgtgtggcttttttctgagtgtactgtatcagccatactgctcactagagcagccagcaattcgttccatcttctaaagcctgctttaatgccatagtgtctacagtcacaaaggacactgacgctgaccaatgggtgacaggaaaggaataaaggaacttgctgttctgcaaagaaattttgtttccccgaagttcatttcttatgaaatgaaaaggcttaaattaaaatgaatcacctacaacggctgacatttgaaaatattgttgacatgtcttccatatatacaggtttttcaaagacttgtgttattataattgtacatatttatggggcacattataatacacacacacacacactgtgaaatgtgcatttccatcctcttggacattgactattgggaactattgagcactttatctagttctttataaaatatacaatatcatccagtgccactcttcctttaacacttgcccctccccttcaccttgcagtgactctagtgacctctgctctactctatgacaccgccttccctggcttccacacataagcaagaacataacgctcgtcttcctgtgtcaggttcggtttacttaacatagtctcctccttggaaaggatcatatttatgctccccactgccactcaaacctactcagctgactccgcagccccaagaaggctgcccatcggtgtggtgtcctctcctttgctgaaactggtgaacacacagagatttgtttcctttgcagatcactcgcatcatgaaggggttcaccacactgtgggaaaccccacttgtttccttcgacttggctctgcactcccattagcctcacatatttgcaaatatttcaagtggacggaaagccatgctcagaccagaaggggcttcaccagtcctgcctttgtttattcttatgcaattagtgacatcatatctttttttaaaaaggactttcaagggtgatgtcttgatctgtatcgtgtcccttgccgactctttctcttgctgcctgctctcatttcgtgaggagcttggtttactgcaagtttgggtaaatagtgttcttctgagtaattagtatccaattaggccacagtttcttgtctgtgtgagtcaagcctcttacccaacccctgggaagaattaaataggtcaggcctctgtttacagaccagagccatgctgactgctgcaggcactgttcaattatccctggtagccagagaaagacagtccacattcttggtccttgtgaaaggggctgaaccaatggccaggtgatctgggtacttcttctctgacatgggctgtgggaggttccacagctatactgaccatgaaagaagcccagccccaccctgtaagtgacaaggtccccacaggcagacacttactggaaaggatacctgtgatgaatctccctgctgactaatgtctaaattgctttactgttcccaactgtgtattaaatctcctaaagtggatgtgtattcacacgtatgtttacatagacatggggaccagaaggcaacatctagtattgttcctgctaagccagataacttgtgagccccaaggatctacctatgtctcccctgtgctggggaggtaagtatgaccacaactcctggtggggttttttgttttgttttgttttgttttgtttttaaatgagagttgtagagatcacactcagccctcacgcttgaaagaccagtgctctacagattgagcagtctccctcagacattttaaaatacagctgtccctcaatatccacagagtactcattcccagaatccctctgtcagcttcctaacacaatctgtgtattttagttcccttatagaggccggtctatgcaatctgcctgtatactttaaacacctttagattaattgtgatagataaacagtgtgaatgcaatataaacagtatactctggttaggaaacaatgacaagaataagtcagtagaggggccccatgtatcgagagcctacagaagaggagggcaatctgaggctagaaaggagagggaagaactgtgtgggtgggttgtgagctgactgtgtgcgtctcaccatggtggatatcttgctgaattgctctgcacatacctcctaagaagaaaagcacttgctaatgtaaacccaagatcattggacaaatttgttatcaaagcagccggaataaaactggtcctggtcctagaatctcctttcatttcctttttttttttttttttcactctctagggtctaccctgatgccctttgttcctggtgtggcgatgtgcacaccttctgtaataaatagatctagttaaatgtttatcattttcatttatttccccccagctaaaagttatgtatctgtttctactactattatttgatttttttttaggtttaatttttttcactcttgtctgcttcatatttattgtttccttcttcctctttctgggtttactttttcatctcttaacgtgaaaggttaggtcttttcttagctgtttcccacaaactctaacatgctgtgttgttattctcgtttagttaaaatagtgttaatccatcttacgacgtcttctctgacccatgagctatttagaagcctgttgtttaacttccaaatatttggggattttccacattcttctgttgttgacatattaaattctgctgtgagcagaacataaactttgtatgattccaatccttttaaatctgctaaggcgtggtcttggttgagcccatgatgtgtctgggcatctgtacaaagaatgtatgttctgtgtctgtcgtggttgatagtgacatccaatagacatcttcaaaaatagcattttccagggcttgcatgtctttaccaattttatgttcactcaaatttttcaaatttttttaatttttaatttaaattagaaacaatcttgttttacttgtcaatcccagttccctttccctcccagcctcccatgccccccactgaccccacatcccacccccattcactccccagggagggtgaggccttccatgggggatcatcaaagtctgtcacatcgtttggggcagggcctaggcgcccccatgtatccaggctgagagagcatccctccatggggaatgggctcccaatgtccatttgtgcactagggataaatactgatccactaccaaaggccccatcgactgcccaggcctcctaactagcacccacgttcagagggcttgatttggtccaacattggttccccagctttacgactggggtccatgagcaaccccttgttcaggtcagctgtttctgtgggtttccccagcatggcttagtgcttagctgtggtgtctgcttccgtcagctactgggtgaaggctctaggatgtcactcaaatttttatgtaaggggtgtgtgtacatggtgtgtgtgtgtgtgtgtgtgtgtgtgtgtgtgtgtgtgtatgacatgtgtacatggtgtgtgtgtacatggtgtgtgtgtacatggtgtgtgtgtgcatgatgtgtgtgtatgatgtatgtgtgtgtgtacatgatgtgtgtacatgatgtgtgtgtgtacatgaagtatgtgtgtgagtgtgtacatgatgtatgtgtgcatggtgtgtgtgtacatggtgtgtgtgttgtgcacacatccacaacaggcacagaacatacattctttgtacagatgcccagacacatcatgggctcaaccaagaccatgccttagcagatttaaaaggattggaatcatacaaagtgtgtgtgtgtgtgtgcaggatgtgtgtgtgtgtgtgtgtgtgtgtgtgtgtgtgtgtgtgtgcatgaagtgtgtgggatgtgtataccacagtgcacgtgtgtggtcaggggacaactctgtggagtctgttctcccctcccacttatatgtgggctgtgggaattgaactcagatcaccaggtttgtgccgagagctcctttatccactgagccttcactggtccgtgtttcctcatcctataagacatgccggcccctttcccctctggctctgtctggttttgcttccattcttgcacgcaccgggagtgtcacttctccgtggtggcctgaccctctgtcagaaccagaccctcatccctgtcatctttctgatgctagcatccgctcaattttgattatttatcctagcgtccctttctgatctgttgtgggaagtcattcagccaatagtctttggggtactgggctactaaggtgtggtctcaggtgctccgtgtggactgatgagaggagaagaagcgtgttctcgctctttcttgtgtggtggttagagatctaatcacagcttcctgttcccccaggccagaggactgctactctctacctttattgccattcgaaagtgttccccaaaaatattttttggatcgtgaatcaactttattttccaaatttgactttatttctttacatttgttcatcttttctcacttgaacttctgaaatatttcagctctttttttttcttgatgtacactgggtatttatttctttaaccttttgttatgaaaacattgtaacaggttgatcaaacaattgtttgggtgtttttcaaaagacaactagaccaggaatacttaaagctaaaacaacataaatatagtacaatctgacatatactaatttggtacttacattttgtatatacagaaaaacaaaacaacaaaacccttctcttcactatctgtaatagtctcaaatctttcttttcccaaataagcatttgatatccttttattcgggcccccatggactcccttactcatgcctgtactgaccctttgcttttgcctgtcttcactggcacattttaaaataggttttgcatgggtcacccatgcccatcttttgtgggttttttatgctcatataagctcagcctttggatgagagtactcaccaggtgcgcatcatgtaattacaggatagctgactgtgagccctccatcctgctgtttttcctgtgtcccccagacctcctttatttcttctcttcccacgctaactttcttttggggtagatgcattttttactgttctattttatacagttatatatattgagttatatatactgaatacagcttttcacaggcaacgtagcatccttagaatctcatgtttgtatctgttgctctgtttatttctcatctaattttaattcaaaaatacatttatttgccttaaatttttaacttttttttaaagacagggtttcactgtgtggccccagcaggcttggaactcactatgctgactaggataacctttaactgagaaatcctcctgcctctgcctcccaactgctgggattaaaggctgtgccgccacacctggcaaatttcaagtaacttaagttatattcactgattcctagtgatattctgctatagtcatagattagtgcctggtccaattgtcatcatagaggcttcatccagcaaatgatagaaacagaagtagacccacagccaaacattaggcagagctcggggaatcctgcagaagagggggaggaaggattgtaggatccagaggggtcaaggacatcacaaggaaacccacagagtcaactaacctgggttcatagggactcacagagactgaacggataatcagggagcctgcgcggatctaagctaagccgtctgcatacatgttacagtgtgtggctcagtcttctatgggtgggagtgagggtgtccctgactctgctgcctcccactgggttgctcatgcatctttgaagtgagggaatgagcctagtcgtattgcaacttgacataccatgtttggttgattgccctgggaggtttgctcttcctaaagggaaacagaggaggagtagagtcggggggaggtgtcagagggggcaaggagcagaggagggaggggaaacttcagtcggatacaatatatggagaatagttttttaagttgcatttacttatttgacgtgggaagggtatgcccatgtgcccacacgcgtgtgatgatgtacagagggcaggcccatgggctcacatgcatgtgagggtcaggagactcctctcctcccagcatgtggacctaggattgattattcacttgtcagttttggtggcacttctgatgagccacacctggttccctaagtaactttgaagggaaaaaattaacaaggcggatatgttgtatgtatccatgcacctagcagcactggcaatctttaaatcatgtgaccataggtttcttagcccttagggtttgaggaactcagtttaaatttattatcataaatttactgtgggttccccggaagtgaattctaggagctggtatttgtttgcaaattattttgtttccatttccaaatgactattttccacgcacatgcaaatcacaggctaatagggcttatttactctctgtcaatctgtctgctgtctaacacatcctgtttctctctttggcactgtatggtttctgatgggaagtctgtagtcattctcgctctctctgcaatttgttcattttttctatgctcataagggttttcctatccccaatttaagctattttaatatgatactttattgtggagtataagcacatgtatatgtgtaggtgtgtgcatgtgtgcacagcatgtctgcgtgtatgacctacaataggcctgttgggctccttggatgcctgggtatgattttcagcagatctggaaacatttctgccattatcccgtcagtgttttctgccactctggtgtcttcaaggaggcttgggctggaggactttattcttctctgcacatcacaggctcagccccagctgggtatcaggttttgagtctctctatgcttcttactaagtcatactgcatgttgactggttccttggccagtgtgtgacctagtcgccttttggttcctttctcaatccagctatgcaagttgtaccatgtataaatctcataggtatcatatctagtgtgatttactgtctggacaactctggctttccttattggctacagggattcactttggaaggaagctaagtaacccaaaggccagacagatgcctagagggcctgtttaagcttacccgggggacatctaaaatgacaatgctctgtcagagcctactgctgtcctcaacatgagtggcttctccaggcttctagatggaccctctgctctgctctgtcagaattaatatcttcacatggaacttggactttatagctccatggtcattctactgcagaggagcaaacaccacaaaagtccccacaaaatcgctgcagctatttttcttttttcttttttttcccgagacagggattctctgtgtagctttgtagaccaggctggcctcaaactcacagagatccgcctgcctctgcctcccctccccccaagagctgggagtaaaggtgtgtgccactgccaccaccacccagcctctgaaggtattttttctgtggtgctccctcctctttgagctctgctctataacttttcatggcattggtttcctcctaccccctgaactgttacagctgcttcttcaactcattgagtctactggattctgtttagatgccacggctgcatgtctgcatttattgtctgaaaaatgcctctggatagaaagtcaggcacttgtagagtttaatattcagtttgcctattactgagtcttatagtcgccagggtttaggtgtcacttgtcccctaaaggctcatgcattagaggcttgctctccggactggagatgggagagatagatgttgagactctcaaggaggaggcagattatgtcaataggttgtctttactctcccaaggctgatttgctgcaaaagagtaaatctacttgagaagagtggaggtttccagtaggagaggaatgggaacaatgagggaatatgatccgagtattatacacatgtcacaatcaaactcattctatgcacaactaatgtacattcttattaaggtttctatttgaaaacaagaagtgaatcttatttctcccctgttctggttttctctcttgtcatatgatctctgtctctcacacaaaatttctccacagagcctcctacattgacaggaggctctgacctagcccagggaaggaaatagaagggaagttccctagaaaaagtcaacacagtcacctggatttcagcctctctaagctaaataaacctctttcctttacatgctcttgggtctcagatactgcattataacaataggaaacatactaacaatagcatcagactatctaccatcccacatctgagaacagctgtccaatctattgtgtccagatgtcaaggagttcatgtgagacaggaagcctgggtcttgttatttcctcaggatcagaaaggcagcaatgtttatttttttaacttaatttgcgtcaatagttacttctccttctgtgagttttgtgtttgtttccttgcttttgtggtctctttttcttagattgacgcctgtgctttgtggtattttcttaattagctaaatttgactttatcatatctaatggttttaagttcctactcattaaatgtcaactttatctattggtagagtttaaacactgtgtgttcccataggctcctggtttgaaggcttggtccccagctggtggaggaggcggggataactggaggaagtaggtcactggggtgaatctcaactcctgcccactctgttcatctctgcttcctgcctccagcacacactcctgccaacctgccgtcctgccgtcctgccttgcctcaggcccaaagctgtagagccagctaaccttgggttcaaacctctgaaaacctacatcaaaaagaaatccttccctcaattcagggatttgtcttgggaatttttttctccgtattgctttggagcctgggctggcactcgctctgtagaccaggctggccttgaactcacagagattcacctgcctctgcctcccgggtgctggaactaaaggtgtgtgccaccaacgcatggctgtcttaggaatttgtcacagctacttatactagtcccttacactccctttcctgtcctttctttcttttcattttatttgaaagttctaacatggaactataatcctcacgttttagttttaaattttcaggatctgtaattaagttaggacacagtgaacacaccagagcgaatgaatcttgaccaagtgagcaatgctctaggctcatgcagtgacacaccacaactcacctccataaagtacaccgttcagtgttttccagagactctccatggtgggatattcatcaccaccaaagaaaacctatgcatcacagtgcctcttattccctgtatttcttttgtttgtactgggaactgaacacaggccctcacacatgttaagcaaacactctatcattgagctacacccttatccagttaacaatagctccccatctttcctctaaacccttggcaaccactgatctgttttctgtcttggcagacttgttcattacagagtgtggcagacacagaatcgcacaggagcttgtactctgtgactggttctgttcattgaatctactggcttcagcttccacccgagttgagtgtgggttgcatttcattcttttccatgggaaatgatgagtcctgttttgtctctccattcctcggctatctttggatattatgaacaacactgctaggaacgtctgtgtacaaatgtctgtgcggacacgtgtttccaatgctcatggagtggaactgctgagtcagatggcaactccaagatcaactctttggggaattgtccaactgtatttcaaagccactgtattaccaatgttttccagtctgtctttcccttctttccctgagctatcccagagggtgacacacaacacactatgactcttatttgtggaagttttttttttttcagtgaagatttaaactctgtttatttatatagccatcaattctctttcctaagatcaaaactggttttctaagactatcgtcatttgtacataatttccttttttaaatttttatttctaaaattagcatacaaaacattagttttcactgtggcattttcaaatatcttgatttcttttctttctctcctcccatgcttctggccttccttatgcccttccattactggcagcctcttttctactttggtgccacacgtgtcctgttaatttctgtaactttctcaacagcatttcccttcttctcatggtcccctccctaatttcattacccatgcctccactcatcccacatatatacacaaccataagcattgaaagtcagaacccactatgaaagaggtcttgtagtatctgcctgagtctgttacctcttctcctagccaggcttcctattgctgtgataaaacaccatgacagcttgcaaactgtctctctagcattcgggtgagcaggatccacttttccttacatgcttgcattctcactcagagactataactaaaaatactatgggtgcggtgagtttgggtgggaaagatggaggagagattgctagtatcatgtttcatttgagataggtaagaagaggccctagcatcactgaaaaaggggattgatttgttttatttccatcttcagcagagccacaaagtcagtagcaggatggaagattcactcctttagaacaaagccaccatgaatggagtctttcgggacccgagactggagctatggatagtccattgatggtgaaagtccttctgtatatatgtttctgtatatatgtttctcttactggttgatgaataagacactgtctggccaatgaggcaggaagataggtaggactaaaacgaggagaattctgggaaagagagagcctgccaaacacagtcgccatgtaggccaccaaaggagtaacaggcttggacccttttctggtaagataagatcatgtggaaatacttagattaatagaaatagattaataattaagatagagatagccaataagaagtcctagtcatcggccaacaattttataactaatatcgcatctgtgtgcttatttggggctgaagcagcatcgggaactagaaggacaagaaacactgcaacagtctatctatcactcagcttgcttggtgcagcagatttctcaactgcctttccctcagccttctggtataccagatgctaggaaagattctggatctggagtagaatcctccagtcagatgctggaaagagacaaacaaggtgtgagcaagcaaatctttggccatctgaggtcagtggagtaggtgtgttggtttcttctggctgggtttttgaaatccagttcctagaggcaggtgcaaggcagtaggtggtgggaggagttgatatatgtgtgattgggcatttcccctggtggtagtcgctcctaattacatagcaaccaaatattccctgatctccccgaggttctgcaggactcatcacactcatctggagtgcattctgcagtctgggttgtgaacggcagccactcatcaacacaagaggtggggcagttagcacatttttctgcagagagtcaaactggataaatggttcatagaaaggtttgtctaagaggaaaagttaaatgtgctaccaattggaatgaaacttgaaaatgtctgaaacaaaccctggtgactcagaggaggcagaaggactattaaacatgatttactatgctgaccagaaatatatttggcaatggaaagttagtgctg

SEQ ID NO: 14 - DNA, 62389 bp, Cricetulus griseus
  >scaffold_9 dna:scaffold scaffold:CHOK1GS_HDv1:scaffold_9:14918802:14981190:1
  misc_feature 20006..20105: /note="n is unknown"
gcaggacccccctgccctacctagacggtaccaactgaagccagtgggaggtagaatatcttccctgtgtagacctactcagggccctgtagggggcatcagcagccttagcatgtctaggggttgaggaaggcctgaggaaggtcacggaaagatcagatagaagattcctgttgggccctccagatgtgtccaaccttgacctggactctctccaattctagagcatcttttctatctgtcccaccaagtgagcctcttcttcttacctgcccctgacagaatggctagggggccaaaggcacaccagaaggagtaatgggaagtcctggcccccacatcccaagttgaggtgggaggcttttccctccccggaagctctggattctgggagatccctgatggtgtggggcgggacgttaaggctgggtagaaatgggtggatttgcccacagaggtcttttctgagccccttcttagccagctgcttgctcacaataagctatggtatatatgtgtctcctgcagtctgtgtccgtcggcgtgttccaaggcttgtgtacaccagcacggtcaacgtgacatttggtgggaagcctatagagcagggtgatgaggattctgtcccatacttccccctggacaaggtaccaacttctgggagatgggcagggtagtaggtttgaaagttacttcccaaaagcaggtatggatggagccaggtcttataactcagggtgcatcccagtaggatggactcccaagctgagtggtacaaactgtctcctgttcagcttgtcttgcctgaggagggttcaaaatcaaatagacctggcactgggtcccacccagtctggcacctttcgcctctggggcagttcaaattatcatgtactctgaacctctgtttcttcatctaagcctgataacaccatggaggggatttgtagagagcaggaaatgagattatgtgcaaagatgtcacaggagcactaaaggatgacatatgaccagaccatccaacctatatctgacaacagtgtcacagggcagatgttgcagactggcaggtgcttccctgagtctgtgcaaccatggggtagaccaagcctccatgggccagcattgccatcaacataattgagttctagtgactgtgttctccttgtcccctggcagcacatggaccactactctcgaaccaaagccattgctgaccagttgactctcatggccaatgggacacctctcctaggtgagtaccatggggcctgcttgtaacaagcatgcctgcctactactgcctctctgaattgtgtgactgagaccctatgtctttccaagtgacatctccacatggtgtgggcctttgtccttcagtgtgttctgagcacctgcatgtccctcctccaccaggacacagcctggacagtcagatctcctgtttgcagtttggtaaggaaaagacttggacagcctgacacttgctctccttgctgtcttatgggcatggatttagttttggcagtcttctttagcattctgaatgtgcaaaggagctatagctctttggaagggaagtgagaggcttctgcacttaatcttcaataacttttcagaaaaacctacctcagctgtctccccacatcctctcctcttgcttacagagcagcaataataaaatagtaactgtccacacttacatgcattcttcatgtcaggccctattttgcatggtaatttcatatgcaaaggttcattcacttcatattattcctaagtgggggatggaatttaggcatccctgtgcttaccagaaatcattgttactgtctttctaaaatttagaagctaaaataaaccagccaacatggtttctctttattgtcaaaattatctatccaggtcaggtgtggtggcatacacctttagttctagtattggggagacagaggcaggcagattgcaagagcaagaccagcttggtctacatagtgagttccaggccagccagaactacatagatagaccctgtctcaaaacagaaagaaaaggggaaagagagagagggtgaccagccaggactacatagagaaacctgtctcaaaaagagaagaaagaaaggaaggaaggaaggaaggaaggaaggaaggaaggaaagaaagaaggaaagaaggaagaggagagggagagaagaagtttatctgcccgggtctggtagcaaagtccttacatactaactactcaggaggttgaggcaggaaaatcacaagttcaaggcttgcctgggctacagagtgagttcaaggtcagcctgggctatatagcaagaacctgcctcaaaaaaacaaaaagcaaaaaacaaatggatatagttgagaggtagagagcttgcttagcatgaagccccgtgtccaatgtctctaatagcattgaaaaagacaaacaaacgtgggaatcaatcagatttggagaacaagagaggcttgaaattatagcctctagtttacagtagaggaaacagagaccagttagctggttttgctcaatgtcacacagcattgagcaatagagttggactttgaagcccaggggagtcttagccccagaatccgggtcttacctactgtgctactgtagaggcagagaacaaggtccctgcatgtgggctcttttccctccaatatccctgcttctgttacttagtctgtcaatccttgacccctgatcctggtgtgtacatcctccgtgatctccaggatttgatctggtgcaggtgaattcccttctctgccagggcacagccctttcacctaccaccaggccagacacctaatcctctggctgggaattatttatatgcacatccccagctttcaatgctgcagagagtcatggataccctaggcctgccctcactgacacagctacccagtgtcccactggccactattgactgcaacctgacctccctccaccatgccccagggacccagagtttaaacttagctgtaggccacagaaaagctcagctgacacctgccttccaggaggctgaccatggtcaccaggggtgattacagcggcctgaggtccaggctagtcctgagatggccctcacttgagctgggtgccagagtcctaataaggaggtcacaaagccttgtcaggtgctgtatcctcttgcacctgcttgtgtagtgccctgcaactcccgttgccatctaaaagctagaacctggaatcctggtgttagctgatgttagcaggtagaactctctctgaaagctctggaggaggggccccctgtctcctccagcttcaggtggccccaggtgatccttgggttctatcgacaaaactccattccttgcttctaccttgatgtggtctctttatcctctgttggtctctctaagacacttgtaattggattagacccagctaaaaatctacgatgatctcaactcaccaatagccttaattacaagcttgaagccttttccagtcacattggcaggttctagcatgtaggcatatctttgagggactactctatcatccatgagtctgggcttcattgtaaagggaggggtgtttggtaaagatggaagccactgggccctggcttactagtggagaaagggaacacacaatgaaggtgcctggaaaatagatgtgcagaaaaaacagcaacctggctgagaaagcgcaggtcatggatagatagctcaagggccctggctggcagagtttacagccagtgcccacagggtttgtggtcctaattccgatgatgctgagagtcacttccaggtgagaacatctaaggattgctgcaggaggtggggtccccaaaaatattgagacacaggatatctatactgggccttccatgctagataaggagcaggaggtatagatggctttgggctccccatcctcatgtactgtgggctcctgagctccatgtgccaccctttcttgtgtcctaggaggaggcaccctccgcacctgtgtgctccgtcccccagggatctatggccctgaagaacaaagacacctgccccgggtggtggtatgtcttcccagctttcctagctccagaggcagaaggagtcaggttaatgtggtgtgagtgttggttggaccttcacagctttatgtcattgcatctgtctaggggcagtgtccctggccagagactctctatgctgggaggtcaccctgatgcccaccagttcattgtccctcagacctaccagggtcaaagctctcagtgtgccagccaagcctctgttcaagccggggagaaagagagctatgaccctagagagacctgcatgtggctgccccaagggctgaacagtttatctcaggctgtcagtgaagtttcttcgtgcctgaaaactagaaaaatccgggcgctgagaatatggctacaaggggctctaggccccaatctcctcacagcctggagagggagatagatcacacagctgtaacttcagcatagtgaagtctgggtagagagatgaaagagaaaatgggcctggcaggggagagagacccaggaggacttcctgaaggaagggatgcctgtggtgtttggaaggaggaaaggggattttctgatgagctgtggtgattagagaaagcaagtaaggagcaactcgatcaactagatgggaggagggacatgttaatgtagtgtcagtgagaggtccccacagctgggtctaatgaagaacacaaggccatggggagtcactgaaggtcatgtggggagtgctgttcttttctggcctgctgcttcaaatattcctttcttgagttcttaaatgatgccctgtcaaatacagtgaccttcccccatttaaatacttaatggaactactactgtgtgctcaggactgttcagaacagcaaacaaaacagacagtcccagctcttgtatggcctctgttctcacaccaggaaatagattaaaatagattcacatgttggaaggtgccaggcacaaagggcaaaaagaaaaggtgggtggggtgaaggaattgggctcccagggaagctggggaaagtgccttctggaggaagctgggttttcagcctccaagggaggaagaagccaagtgtgtcaagcaagcttttggggtaagagcctccagacaggggggcgactctcctaagattgtccaggagcacccagaccaggcaacacaagcaggtgaggggggcgtgtctgtagcagaggaagctatagagtagctgggacaggtctggaaggggcattatcagcatttctgtgttcatcatcacagcccatgtgcagagcagatggacggtcaagaagctgttgtggttcccaaggcaaaagaggcgggtggcagtagggaagaaaagtggttgaattctgaacagatgtaatagctggggcagctgagtttacaggtggtttgaatgtgaggcatgagagaagtgaggactgtcaaaggtggcccagatcatctgtgagacaagcaagcagagatgtccagaggacccgggacatgggaattggagtctagcctgttactggaccctcagaagccctgagcatatagatagagtgtaaaccacccagctgagcctgtgttgccgtctctcacaccagagccatatcaagaagagactgttcatgttccggtttggggatcgcaggacacgcatgaactgggtccatgtgcagaatctagtgcaagcgcacatgctggcggctgaggccctcaccatggctaagggctatgtggctgtaagtgttctgtgacatccctgccccccacccccaccccaaggagaatcatggttcaggagtcccagggtcactgggttgtgtagacgcttcagagagcatacataattagctcttccctgtgaccctgtgacatcacagcttcaaactgaattgtgtcacagtttccacaataatcctcatcttgctaaagaaaactgaagtacaatgcggttgaatgagtccatcagagtcacacagcttgtcagtgtggttgccctgttatcaatcttggggacagaatctgtatcccaagaagccaagttcaatcactcctttagaagccaattaaaggagtcaaattaggtcaagcgctggtggcacacgcctttaatcccagtattccggaggaagaggcaggtggatctctgtgagtttgaagccagactggactacagggtgagttctaggagcaggccatgtagagaaaccctgcctcaaagaacaaaaacaaaacaaaagtcaaattattaataaaaagtaaaagagggataaaaggacccaggctattttggaaccctgaagtgagattaaagtttaatagagtcccagaaataatgcacttcttggacaaggtatgggcctgtccaccattgattcatcactaagtgggcttggctctcatcctgtgagctgttgcaatggaatgaaagggagataagctcccctctggctgttttttccagcatgaaattcctgaagaaatccccatttctttgggggcccattgtttcaatagtcagatggtcagattgatagacatctgactcacagtgtaagcatctctctagaatatcatcatttccgccaagccagttatagcctttactaaggtgttgcccaggtctgtccccagaactgctcaagaggacaagtgggctgcagcagcagctgggagctatgagaaagtgtggagtcgggctgtgggcagacatctgacagtatctggtctctcctgtcaccctcagagtgggcaggcgtactacatcaatgatggggagagcgtcaacctctttgagtggatggccccactggtaggtgttctggtcccctaacccagagtgagactctaaaatcccatcctctgtccttatatcctttcctacctccaaagcccaagaatttacattaggaagccctggcagtggcatgcctgaatggcactgtgcatagttggaactgggccgtggctgcccctttatgatataccatgtgctccctgattttgtcacagacctcttccgatttgcttcctgatttacaatgattctggccatgtgagtcttcttggaccccagggtccatgctaaagcaagtggtctgccactgaaagccagagtttgattgtaagccttcagctgtagaaggtcaccagagcccagagggaagagctcagtctctgagaaccctgtcctctctcagcagcccacagtttccttaggaccaggcctgtgtggaaagtgagcacagaagctgggctaaagtcttgtactaatgtgccagtggcagctctgttttgttccattgaagagcacttgcaggatctatgagtactggctgctcttccagaagacctgaatttaagttccagcacccacatggcagttcacaatctgtaacaccagttccagaggatctgatgccctcttctggcctccatgagcaccagtcatacatacaagcaaaacacccatgcacgtaaaggtttttttgtttttgttttttttttttttaaattaaagaacacttttattgagatgtagcttacaagctatgcagttcacctatggaacggatactattcaatatggttttccttttaaaattatatttagttatacaatcatcatcacaattaactttaaagtaggtcttcatcttcagataagcaaaacaagcctgtacctctccccacctctaccctcagcccaccccactccaggcaattatgggtcttcctctctctacatttacctctcttgactattttatatgaatggactcatagaataagtgaccttctgtatctagcttcttctcccttagttttgaagtttgatctgtgttgtgacatcagatcaagacttcatgcctttctttttctttaatgtattgaaggggatagccttctgtatatgtttctcttattggttgatgaataaaacagtttggccaatagaggcaggaagataggcgggactaggagatgaggagaattctgggaaaggtaggcagatagagataccatgtagcggaggaaggcatagcaggtccagacccttctccggtaagataagaccacatggaaatacttagattaatagaaatgggttagtaattaagacagggctagccaataagaagccctagccattggccaacagttttataattcatatagtgtctatgtgtttctttgggactgagaaggatggcgggacctggctggaaagagaaacgccatcaacagtgagtgtgtatgagcgcacctgtgtatacaagtgcacatgtatgtgagtacacctctgtggaggtcagaggacaactgtgttcctcaggcactgtttacttacttgtcttttgggacagggtctctcactatccaccaagtagactaggctggctggccagtgaccccacactgcctcccccccactgggattacgttactgtgtatttgcttggagtttctgggctaaacggttactccagatttaacttttcattgaagaactgccagactgctttccagagactgcaggattcctgtttcccagtgggtgggggtgaggacatgcccccattctttccagcctgccagcctttgatggtttggctttgaccagaagaggttttctgcaggtggacagctccattcagtcatcccctgccagcctgtttcttctgagtctccctctgccttccacccacttgctgggttttatctatttttctttaatagtgcattcaattctggaaggagaaaaaaaaacagattctacttaagggcctgggaacatgttcaggtgtgggcggatatagtaaatgatgtgaaagattctaagtttaaaaacctgccctagaggctggcaagagatgacttagcaggtagagtcccattgccaagtctgacaacctgagttcaatccccaggaccacatagtggaagtcgagaactgactgaaacaaattgtcctctgacctccatatggcatcattacatgtgcaccccgaacacgagcacacacacacacacacacacacacacacacacacacacacacacacatacacgcgcgcgcgcgcgcgcgaaaaagatttgtcctatgttttcagctacttgagttatccagatcaaggagtggatctcatttcaagactgatgcataaaatcaccatcatgctaggcagagtgtgaacacctttaatcccaacacccaggaggtagaggcaagcaggtttctgtgatttgaggctatcctagtctatatagagagaccctgtctcaaaaaaaaagtagtgtgaacttggggggctctctgggctggtgggggaagcagttgatctttcctcatcagccagtccctaaacaacatgtttccttgcagtttgagaagctggggtacagtcagccctggatatgggtaccaacttcctgtgtttatctgtcaggtaaggaacagcatgggtattagagcccctgtattccaggtacacacacacacacaccatgcatgctttacattattggaaaaccagggtctggaatatgatgaggccaaggaggcacacagggcgggagggtaatggaatttaaataggttgtgcaggtgcacccagcctgacgctgcactcagaggagcaagtctctgtattgccacagctgcccccatttactctccattggcccaccctgcttaaacttgagcctcttgcaaggctggaatgactgtaatcaaagagactggagctctgaagtggtgtggctgaggcttgaagtggagctccctgaagtggtggtgggggtgcagctttgacacctagacctgtgctagaaggcatgatgcctagtggggcagagggaaccttgaggctccccttcttccaagttcacccagatgccaggccttctttgggatgtgtggagatttggaccttggattctccccctgtctctgcaggtcagtatctgctcccactccctggtcccaccagcagacaatgtcctactgctgccctctgctggcttccttccagtaagaatgcacgtaggcatcaggcttggggtgaggccgaggaacaagtgaccctcaagtcacaaagggctgtgttcctgccacatcagaggctggacctactgttttaaatgcattgtttgttattgaactcatagacttgcaaactcattacccaggtgggtgatgtctgcacagcagtatcatgatgacatgcctcacctgtaactcaggtgatggcaatttgggaggattgtattcacatatgcagttctctgtaaactggctgcaacctggggcatcttcacaaaggctgtacactagaaccccctggacatttgaaacaagccaagcctcagccacacctcaaagaaatgatgtcaggataggcgtggcagggaagcagctgtgtttcttagggtaagaagcaattccaattcctccctctcttacccaagtcagtatatcaaaataagagagagatgccaggcagtggtggtgcacacctttaataccagcactcgggaggcagaggcaggcagatctctgtgagttggagatcagcctggtcttagaacatcaaggctacaacaaagaaaccctgtcttggaaaaaaacaataggagagaaagccaggtgtggtggcatatctgtgactctagctagcacttggaaggctgagacaggaggatcatgagttcaaggtcagcttgagctacatagagcgttctaagctagtctggtctacatagtaagatcctacctccaaagagaaagcttgaagaccagcaagatggttcagtgggtaaaggtgctaccaccaagcccgaccaccctccactcaggtcaatccttgagacccacatggtagaagggaagaatcaactcccccaagctgtcctgcaacttccacacatgcaccatggcatatatgcacatacacacataaacacatacacaaaataagtaaatgaaacataatttgaaagtagttgagagaatagaaacaccttcgagtgttctcagattcatttttactcttcagtccttcaatattactcaatgctaacttattctgacatatttcctagccaacaggcccccagacaaatgctaatgacctaaagaaatccagtgacctttgtaaagggaccccctagacaaaaaaacacatcccccaatggatttgtcctgagggtccctctcacctgccctttcccacagctgcagtgatggagtacgtgcacctggcattgaagcccatctgcaccgtccccccactactcacccgcagtgaggtaagtgtgctgggtggggtcagggagctccagccctgaaccttcccttcccttccacatctccactgcagccagacatctctggcacaagatacttctctgaggtctcagaatcttccgtgtaggcccaaagctacactcgtccctttacaatgctccctactgactaaggttttgctcagactggtggagactggaaattgaaccactccaagcaagcttcgtagctgttagtccagctatgggtggattattttctagtcagatgtggggctcgcaaaggcaggctccatagcaggcactgtgagccccaactctgaatatacacatgtgcacactcacacaaatcctcagtggctctaggctcaccattcatacttacttaacggtgtgtattaactgtcttctatgtacagagcatcaacaccatcctcaaagttatgatgcacaactgcttagagggttgttttttgttttttgagacagggtctcactatgtagctctggatatcctggaactcattgtgtagagcaatctcaaactcacaagagattcgcctatctgtgcctcctgagtgctgagatgaaatgcatgcaccagaaccagctgatgtgtagttttatatttgcttagcatgtgccattcaaaaataggacatcctggggctggagagacagctcatcagtttagagcacttactgctcttcagagggcccaagtttgattcccaacacccacatgctggctcataaccacccatagcttcagcccaagggatctagcaccctcttctatcatgtgcatggtgcacatacatgcatgcaaacaaggcattaatacatataaaataaatataaaaacttatttttcaaaaaggctgtcttaggtagactgaaaacaggcaacaggtggtatttagggtctctctcatttgattcctcctagtgctaaattaggaagggcaaaaagatgatgttctctactgtatgatgaagaactgggcactagacaaatcagtggcttatccaagatcacaccacattggaattggcttcaggatgccaagttcatcactccttaaacttaaaggaaatgggagggtggagaatgttccaaagaagccactgccttccattgttcctttgagaattccagactgacagaggataatgatagtcctttagtttcatttgatatttcttgctgctggaaactattgccctgtccgtaaacaagaggaagttagtcaagttgcctacccaggatcactggcttacaaggaactgatgggatttgaactcagatctaaaactccatcactagcttggaaaacacattgggaacaaaggcaaaacagctgccaggaatgctgcagagctgtctgtagtcaggcaaggtcttgaccatccttcctcttgtctaaagtgtgggttaacttgtaggctccagggcataggatttgaggcagtttggggctatgggtcagttgccctctgctagtcagtctgtgagacagcaatttgctctatagctttgaagaccctttcattccttgagcacctgctatgtgccaggcactgcactgagcactggaggtaagaagacttggtccttaccccagtctaaggaggaagatattccagaaaccagacaactcaacatggtgatgaaagctaccctgagatgaggaattttcccagcatgcaagagaggcatcttcaccctgaggtcactgttaagcctgacctctgagaacagtgccaggacctgcttgtgtagttcacagctatgtctccatacaagaggtgcttgtttggtttttaggatatttattaaccttcattcccccaagccctgaacgttctatctggggcaagaaggacaagacctggtctctctgcttccctcattggggtctctgggtcagtgattgaccccacgagcttgtctgtgccatgtgagaaccacgtggccaatgtccagctagagaagaataaaaggccaggtgggagggcacctccaggccccagaatgacaaagaatatggtctaggaagcggctcttctgtgtaacccgaggcaagtcacttaacctccggtcttcaatttccaatcatggaaagaggaaatagtgtcatctcagaggatgaatgtatataaagggccacaccaagcacagtgggagttctacaatcgatagctgtcatttattaacctggaagtaggtgggccccaggccaactggaagcagagcaaatgcaactccgacttagagaggaatcactgtgtgtaacttaatttctctcttagggacacttagttaagcagctgggagggctggaaggctgctctggaggccctgccagctacagttggtattgggctggccacaggaagccaacgtctttctttggagatgtttttctggagagctgctccccactacaggcaggaggccttcggcctctcttggcgttcaagaatgcatctaagtcctccagcggtccagaacggcgctaagctggggaaagaagcagaaacaagtattaaacaagacgagaatttagcggggctggaggatgagatgcagaaagggcatccaggaggcggcgcccttctggaaaaagatcttagaaaggacgatcgccccgccccaggaaggtatcgcaggaacaaggcgcagcggccagtttttgtaaactcccgtgtgacatagaaacaggctgtcctccccttaacctcttggtccacaaggtagaggatgttctcccctcccactagctccgccctccgcggctccgcctctcccacaggtgctcagcgtggccgtgacgcacaccttccagattgccaaggcccgcactcagcttggctacgcgcctgacaaattcagcttcgccgacgcagtggagcgatatgtgcaggtcacgaccccgcaacccggtggcttcaccacgctgacgctcctgcggctgctcctcctgctgctgctcctgttcggcctgctcggcctgaccctacacttcctagggctgcagactttgcaggagtcattgcaacgcgtctgatctctgccccgaccaccagtcacctatggctctcagagcttgtacctggttttgacctcctgatataggcacacccctgcatcatgaccccgccccgattcctggccacgcccctgctccaccctctaggcttgtatttgtcctcgtgtttgagctcattttctctgctttgccccctgagtctcaactgaatttccctgccctgatctagcttcatactcttttcccagactggacgaggcagttgatgaggtcccagcctcccagcctgctgcttcttcccagccatgtccaggttcctatccagtccagccctctcctccctattcctcttcctgctctggtttcgccctttctgtctccacccttatgctgaagccccaacaacgaggttgcttctttaggggcaggcctaactcctccctattgctcggtccccttccagccctgccttcgggggtttgtctaagtgggtgagttctggttggtggagtctgtggaattggacctgtcttctgctacttctggggacagaggggcctcctccctgccatggcttcttttgagttcgtcctgatcttgacacagatctgtgtgttgattagctggggagggatgcccagcccagcttggtatctttgggtcctcagttaatgagtggagatgacccagcacagtaaaagatttcagtaccagaaggggcaaggaaaaaaaagaaagaaaagaaaacttcacaaaagaaaatggaatgtatcataaaagtaccaatataatagacaaaataagagtttaactgatcatatattgtgtgtacttgtttgtggaatcagagtttgtcgtttctgaagctgtctaccccatttttgcagacagcatctctctcactggtttggagcttggagtggcgaggctggccaagaaaccctagggatcctccctgtctcttgcttcccagccctgggattgcaagcctattccaccacacccagcattctgtgtgggtgctggaagtcaagttcaggtccccatccttgtgtggcaagcactttacctactgagtcatctccccagccttcatattttatgatttagtatcatttgtattttttcttttttaatttttaattaaaatttttcatttattttacatcccaacccaagttttccctccctcctctcctcctgttccctccccctggtctctcttctgccccttcccccatcctctcctcctctgtctctattcagaaaggggcaggcctcccaggggcaccaacaaagcttggcacatcagttaaggcaggaccaagctcctccccctgcatcaaggcaacccaggcaacccagcatgtggaataggttcccaatcatttgtatttcttgatggctagtgttgctcactatcacctttaagagtttaaagagtttaaggccctagtagacagcaaagtagctgccggcctgcagtggatcgtaccttcataggtggtctctctcacagcatatccctgtctggtaaataaagaaaactgtgtaagagttttacaatatgataggcaggattttatgtgtatatatatacatttttttaaaaaagtcaatagtggggctggagacatggctccatggttaagagcaccaactgttcttcagaggacctgggttcaattcccagcacccacatggcagctaacaattgtctgtaactccaagatctgacaccctcacacagacatatatgcaggcaaaataccaatgcacataaaataaaaattacaaaaataagaaatctttaaaaataaaaaagtcaatagtaatcatttctgtttagtgaccaacacctgcagaaacttgcatttgtacagccttatctcattattagagccactctgatttgtcacagtcaacttacagatgagaccatgactaatttcaagtatcagagggtaagggtagctgagtttcccaaggcccaatagaaaacataatacatggttatgtcagttgcagcctgactgttccagatttggggttgaactctggggtctacctccctacaaatctcaggccatctgaggtggccttcatacttgctcttcctgttgctatggtgaaacactctgacaacaatttaaggaaggatttattctggctcacagtttgaggcttggaaaaatcaatgtcaggaacttgaagcagctggtcatactgtgtctgcagtgaggaacaagagagatgattgtgcctccccaagcccaggggtagcgttgtgcactgttggagtgggtctttccaactcaaccccattgagagactccatcacctaatccatcttggcatgtccagaagctaacctaacctaatctaacctaacctaatctaatcctgacagctgtggggttggtctcctgagtggctctaggtcccctcatgttgacagtccacactaaccatctcaagtggcaattggacttccttctctgtatttatttgcattgtctaaacgcacatccttttcttcaaattccttcttcctaccttcccttcctgagaatatggacttccatgttcacactattatctagccaagaatcagtttacttgttttctgggtttctccataatcctccccacccaaggctctgaaagtaacaagaccaaggcctgagcatggggcaacatggatctctagcccaactattcttccttcctctctttaccaggtggaaaggaatgtggcacccacccaacatacaaattaagccctcggaggatttagatgccactccagttaaccagcccttgtgagactctcacaggaagggctagcttgtttaaaggcactaaaggagtcatatgcccaaaggaagttttatttatgctgtgtgtgtatatgtgcataaatgcagatcagaagagaactcagaggttctcacctgctgctttgtgggatcctaaacttaaactcaaattatcagccctagacaccagggtctctacaagctaagctgtccattgggcatatgatcttgccaagcctcttagtaggactcatggctccctgccctccttttcaaatcccctctgatctctgtgacaccacactgtgtttcttgtcaggcttcctcacaggtgcttctctcttcccctccctcacccctattttaagatcatgtcccccaggacactgtcccagcccctcttctccctctgcgctcttcctgggtgactccatcccttcccatcatctcagtcctcagggcctccacttctgtgtcatctactctgagtgtgcccttgacctgcagacttctgtgtccccctgcccatctgcctttgttcagcagcattttagactctgaatgaactgtactgaccttgccacccccgcccctttgtccatctgccagaggacaggcactgccagcccattctcctgttcctcctcttcctcttcttggtccaaacccaagcctggccatcactcttcttcaaaacattttcatcagtgagtgttgccatatctacttccaaaatgtctctttcccacccctttgattatgccacacaatgctacgaaccactgtcccttctctgacaaaattgaacgcccctgctggactttatgaatcccaaactagaatgtgccactaatcaatctgacaactgttcatggtttcccattgcgctctgagttcaaagccttaacgtagcgttcatggtcgggtgtgccgcccacctctccagcctcatctcctgccctccgaccactcttctacacagcgacccctgactgcttccacagtacctgcagctctccaggctcttactggcctctggggttttcctttttctgaaaatctttctcccaccttccgtgtacaatttcaggtccagctaaatgtcacctctttgtccccagagccaggtaaggacactgcagtgcagggcacgactcgtgtgtaaactaaatgatgatgtctctgaatcaaacgagttcagcatacctgtcttgtttaccctaaaacgtcaccgtgagctgggtttctggcccagagtaggacttttataaataattgtgggacaaataaagcactgaggggcccactaagccacgcctagagaccacataggagaatgaataaagctgagacctcaagattagcattcctacgtgggactacaccccagccgcccaaccatccgtagtcacctgacatctttccaccaatagaggttgatgggtgtcagccagcgccgggaagggaccctctctaactcaggtcatgctcgcagtcacccacaaccgtctttgctcttagcagagaccctcgaagtgtgaactaagacccagaccccttgttggggatttgcaaggtgttctagactcactgccctgaaatggaggaggagttttgttttgtgttttggtttttagggaagaaaattggtcaagaaagaggtttgtgtatgaggctaatgagatttctttcgttgtactgtttatattttcttcttcatcttattttttttaaaaaaaagaacttcagagggaatgaggcgtggagggcagaatcaagaacctgcaagtagaaaaatttaaaacaataggatgtggcagcggtgggattcgaacccacgccatcgaaatgactggagcctaaatccagcgccttagaccactcggccacgctacctctcgcttgaaaggctagccattcagagtatatcagtatgatgacgcgaagcgttggactttgcaagccccgcccctgggtgtttctgagcctgtgagctcaacctttctgcacatagtgacatccaccattattttccctatgctttggtttctggcaccggaagcaagcaggaatgtaccactaaaaaggaaaggacagcccctgcgtgtcaaccacgagcacttgatcgtagcgtgggatgatttgagttttgcatttttccatggacgtgatgctccctgcagccacctgggggcagtgctgggctgctgcggccccgctcgcctgggaggggcggtcgctggggaacccgatttgcacctagttcatcctgcgtcgtctggcactcctacctcattctgtaatctcgcgacccgtgtccgcgcggtgtccagcaccagcgttgtcacggatcttttgttgatgtggactccttcgttcttagtatcgcattttacagagtggggaaaagacctggtcatttgagccaggctagcgttctccgtctctcaagcccacttggatgcggactatttcagttgtttttaggaaaacgaagtaacagagaggaccttctagcaattttgaagatcggcttgaaatctttaaaacaaaatgcagtttaaaattgtcttctcttctgatatccctaagtttgctatttctttttcagcagttttaaatcctccaagtttactcttttgcaaattttacacttaaatcatccgtgcaatgattagggaagagagcaaacaaactaccataaaggaaggtgaatggatatgataactaacacctctcacactacgcacaaccaactggagacccaaatnnnnnnnnnnnnnnnnnnnnnnnnnnnnnnnnnnnnnnnnnnnnnnnnnnnnnnnnnnnnnnnnnnnnnnnnnnnnnnnnnnnnnnnnnnnnnnnnnnnnaaaaaaaaaaaaaaaaaaaaaaaaaaaaaaaaaaaaaaaaaaaaaaaaaaaaaaaaggatagggagactagcctagatccaagtggccctgaaaagagaagtaaggaactcctggagataagagaatggtgtggcggacacctttaatcatttgggaggcagaggcaggtggatatctgagtttgagaccagcgtggtctacaagagtgagttctaggacagcctccaaatccacagagaaatactgtctcggaaaaccaaaaggagagagagagagagagaaagagagagagagagagaggagagagaggtgggagagagagagagggggacaggggagagaggggagagagagaggagagagagagaaaagagaggagaggagaggagaggggagagagaggagaggagagagagaggagagaggaaagaggggagaggagagagaggggagagagagagaggggagacagccccagtccctgagaacctggagcctccaaaaaggaacaggagatggctgaccccttgattttaagaattttgtcctccagaatgatttgagctgctcaatttgaagtgatttgttaaactaatacagcgtagtaaacccatggtttggaaacacaggctaaccggctttgtgatctagggaaacttgctgtaagagagtagcaacaatagtagtcacctgacagaatttattgtgaggatttgcttttttcattccacccacaatttaattgacccacagtgtgtgaaacatacctctggtcctctcagagaatgaagtcgtgtgtgtgtgtgtgtgtgtgtgtgtgtgtgtgtgtgtggtccttattgggtgtggcccactaccattctcccattctctgttgaccaggacaaggcggtgagccccagggttcctccactcctccctgccccatcactaggattgcgctcacctgccacgtgtccggttttctacaagagtgcaggggatcagaactctgggccctcaaccttgtaaaacaagtactttactgactaaaccatctcctcagatcctgaagtttttggtttgattattattgttgtttgtttgctcttttttataagacaaggtttttctatgaggtcctagcttttctggaacttgttctgtagagcaagctggcctcagcctcagagctgtgcctcctaagagctggaattaaaggtaccatcactaccagcttaattgttcttaattatgtgtgcttgtgtgtctctgtgtgggtttatgtgtgggaaggaaggtgtctgcgaatccagaagtaggcactggattcccctggagctggagttataggcagttgtgagctgcctgtcgtgggtcctgggaaccgaactcctggtgtaatgattcaggcattatgctggccctgcccctgccacctggcagaatgtattcaggcagtaccctgggcagcccagggttgcatgactactagtctccacgccagtcaaaggacccctttaaaagacagaccccacccacttgagcttttccaagctctctttccctctcttctctttcctgctgctcccctgggggcagacaggacttttcctgtctccctcttctcttctgttctccttctgtctgtgtgtctgtttatctcttttctcttccttacccacttccctccccttttaagctctgcctgccatggaatccaccaaggttcccctagtgcctttattcataacacctggttctctgcaagaacagtatgtgctcttaactactgagtcatctcttcagcctccctgaagacgtttttttaaagatcaactgtggcaacacatgccaaacactgaaaggaatccccatcccagagatctgagccattctttgcctcaagatccgccctccccccccacacacacacacacagttctatgggattttatgaataccttctctactctactcgttgctcaggaaggtacttaaaggcctctcctcccaggaagaaatggacacttgtaagatgtcaactccaggaaaacaaacaatagtttttagttgcccaataccaaatcttcaggactgatgacagtgttgaccaaaagaatattgattgagagaaaaatggttttgctttttgttttgttttatgttttgttgtttttgttttgttttgttttgttttgagacaaggtttctctgtgtagccctagatgtactggaactcactttgtagaccaggctggcctggaactcacagagatccacctgcctttgcctcccaaattctgggattaaaggagtgcaccaccatgcctggtgttttttgtttgctttgttcatttgttttggagatttggggggagttgctttttttaaggggggggcagattctggggatcaaatccagggtcttttacaggttaaatgctcaattcaccactaagctacagccctgccctggattttattcttgctgaaggccaatccatctgacctccattgccatttgagttcaaagacagaggcaaacatttctgcccagagctgcccatcctaagagctaacagaattaagttactgtctggacatggccaggccctggcctgcctttctggaaaatcaccctcttatgtagtcacaggaaggcacagagttctctttatgtaggctatctccccaaaataactcagagcatatttacacacacacacacacacacacacacacacacacacacacacacagagagagagagagagagagagagagagagagagagagagagagagagagagcaccataatttagctcaaatcagggtttattctacacctattaggtctgatcatgcaaaagcgggccttagggaggggcacagacacttgttaaggtgttcaggacctgcttacctccaactccaactccaacctcagagaggcgaagacttccgtctgctcccatccagcctctctccagcatcctcatctttcagctggccttccccatgcctgctgaccacacttctctgataatttatgccttgggtgacacagtaagggcagatcaaatgcaaagccagccacagccagggaagggtgaggaggccacagaaaccagagcaaccaggctctatttagctttgtaggagtttctgtttctaagtgacatttcaaaataactgttgtaaaagtaatcagtgttccttagtgaaactggagcaaagaaagaaaaacacaaataaagtcattgctcattttcccaccccattctctgtctcctcttccatagaaaggaagctggtttctggctaagtttgaattgtactgcaagctcgagcctaagattttaaaatgcctgatcctatgtgtaaagttaaaagggctaaagccttcctttaccagtgaagcccatcaaaacaaacaacaacaacaacaacaaaaaattggcctggattctttcagatctttttcctattcaaatatttggcatatagagccagaagccccatcccaagaacatcctaaaacagaagaggcatcattcatggactcctcaagtccttttataaaagctgtctcaggtcaggtagtggtggcacacacctgtaatcctagcacttgggaggcagaggcaggtggatctctgagtttgaggccagcctggtctacaaagtgagttccaggacagtcaaggctacacagagaaactctgtttcaaaaagccaccccccccaaaaaaaaagacaaaaaaaatcatctcagggctggagagttggcttggctgttaagaacacttgtagtgcttgcagaggacctaggttcagtccctagcacccacatggtagttcacaactgtcaaaaactccaggtccaggagatccaacaccattttctgatctccacaggcaaccaacatgcatgtggtacatacaggcaaaacactcataaagtgattatcttaaaaaaaaaagttaaaaactatatctcacgatgttgccatgcagcccaggctggtcttgaactagcaatcttctgtttcagccgtttttgtttctatttattgaatttattttatgtgtttgggtgttttctatatagtgagacatcatttttaaacttttgtcttaaaatattacatatatatgtatatatatgtatatacatatatatatatatatatatatatatatatataatgtcttgtctacatgtattctgtaccacagtgcatgcctggtgccaacagaggatgtcagatcctctgagactagaggtacagttgtcagctaccatgtgggtgctggaaaactgaacctgaacctggatccgtggagaagcagctcgtgttcttaatggctgaaccatctcttcaaccccctgcctcagcttcttgaattctggaattacaggcatgtacagtcacacccagctccatacatagttgtttttgttttgttttgtttttttaatgtggacatctattctgattttttaaaattacagttgttttgtgtgtggatgtatgtgaaggtgcatatatgctacagtatgtatgttgaggccagaggatatcctgcagaaattagtaatcttccaccatgtgaatcccagggattgactcaggcttatttgtcaggcttggcaaacgcctttacctcctcagccatctgccgaccacccccccacccagttccttttgtgtggtacatattcccttcacccttaggcatataactgagaaggggctgctaggctctatagcaacataaaaatatctaaagagtacctgaaaacatgctctatctatttggaaagtggggatcaaaaatgtaaacccagctgggagtattggtacagctccttatggctgcagggactgatctttccgaccagcaggccagactggggcaaaagccatataagctggcatttgcctctctgagttcatgtagcaacatggggtcttaatcaagaaagtcaaacttgccctgcgctgtgagcatgcctttagtctcagcactcgggaggcagaagccagtctggtcctcacagtgagagtcagagctatgtagagagaccccatctcggaaggaagggagggagggagggagggaagggaaggtgggaggggagggagggaggaagaaaggaaggaagtcaactttttgcaggaactattcatgctgatagcagtgttcatgtgtgaagggctgacttcccctgggggaacaggatttactgctctcaaacacagaagagcccaggcttagggcagaagtgtctgaatacacccagatcctggctagatctcgcctctatagcttactgtgtaagcctggaaaagtcacattcgcagtctcagtggtctatgtacaaagtggagtacaataagaaggttgtgatgagcattataaggagtattagtgccagtgtgttaggtccctttctgttaccagtgacacaataacacaggctgtcctagtgaggcttttgttgctgtgactaaacactatgaccaaaagcaacctggggaggaaagggtttatttcatcttgaagggaagtcagggcaggaacctgttggcagcagctgaagcagaagccatagaggaacactgcttactggcttgctttgccagacgtactcagcctgctttcttacagcaccagaaccagggtcagacactgccaatagtgaactgggcccatccaaatcaattattagttaagaaaatgatccacaggccatttgttgggggtatgttctcagctgaggtctctttccagatgaagtatgtttgtgttgaattgacaaacctgaacagcacagactgggagatttacaaagagaaggtatatcaggatggcagcctagcatgcagaaacaggaagtttactgggaggttgtggccagtgtgtgtggctggagagatggcttagcaatttagagcactggctgtgcttccttccagaggagctgggtttcatccccaacatccacaatgccagctcacagctgtctataactccagttccagaggatcagatattcttagacacacgcagacaaaacacttatacacataaaataagtaatttttttttctagtcagggtttctctgtgtagccctggctgtctggaactccctctgtagagcaggctggctctacagagagatccacctcaagagatccacctcctgtgcctctccagtgctaggagtaaaggtgtgtgccactactgcctggcaaaataagtaattttttaaaaggtgtactttgactcatggttctgaaggtacaaagtgaagaggacattcctggtggtttttgctggtagaaccccaagatggttcggtctccaggtctttaatcttaaggcccaggtcacataagcctgtggtagagtagatgttagagtggttctcctgccccctttcctggctgggttcctgtgcaagacatactcttcataggcctcagttccatggtctgtaccacagggctagtgatgcctgctatcttgcagagctgacatgcagctggagggacaaacagctcaaaaagtatgcagaaggatatgatatcaaagtgtacatggctgtcaccactggtttttagtcttcacatcttcccagcactacctttcttccatttattgcacctgttggttttcaaaacaggtgtcattatgtagcccaggctggccttgtgtttgtcctccttcggggtctcaggggtacaccaccatgcccaagttcccacagattaaacacctattatgcaccacgtcctaggctcagagttaggaatactttaattttttttcccagagagtccaggaaagcctgatgaagataatttaaaattacacaaatactttcaattgccaggagcgtctaaaaaaaattagctcatcacaatttggattcatcatggaatttttcaacaaaatttttgtttctcttcttccttcatcgtccttccccctttgtgaagtatcaagtttcttcaaagcaaaagtcagaaaactcaaagattttctgacaaaaatattttaggttatgctcggcacactctgccaccgagactgtactgggtctgaaagacaagagacatagcggagtaactggctttagactcagactccggggaagtgttcaacaggcgggggagccaggagactagcccagctctaaggaggtgatggccacccggaggcggtcacgtgagcccgggcgtgcgtcctgtgcgtcagtcccgccccagctcgggtcttagctcaggtttcaaccccactggcagctgcagcctaatctctagctccagctcgcacgtttccacgcgtcctactgaggctcccggagcctggctctctgttgtctgcgctcgtgccggggatcatccattgccctctgcaccctggagcgccgggctgcaagcctcaacaaactactctggatccttgtgaccgtgggcagtggctgccgcgcctgtccccctgcgggaggtaggtgacgttgcgatgcggcgcctgcgcgccccgctgcagcggagccctgaaaggtgattggggcgcttctctggttgccaagctcccccggggcgcagtgtttgcgcctgtaaagttagagatgaaagactatggcaagcgatgggtgccgttctggcagtgcatgcagagcccccgcctgggtctccgctctttgtcccggccagtctcctgtctctttgcagcatccaagccgcattcccctcacccggttccccacactggaggtctgtgcagccctcaattcccggaacctcaaggtctgtgcagtatacgcccttgctgattgagggagttggggtgttggcaggcattggagacatgtgcgccaagaggctgagtgttaatatgcttttggtggcgcgggggcggggacctccccggttagccctggccaagataagctagtgttagcctgggaggttacagggaaatctgcccagctgcaccctgagtgtgaccgatcgcgtatgttgcgaaggagtgtgatctaacttggggatgctgttccttgggggcatatttctggttcctctgtgatggggcactccctgtcttggggccacagaattaagaaagttgattttacggaggagaaaaccaaagttcagagaggtctcaagaccccagaggctaagtagggaatgtagattatgtagacaagggctgtgtgtataggggattaagagtcaagttttgggaagacttcccagaggaggtggtgtttgagctgtgtggagaaaggagagggctcaggccgtgttcaaacctcgaccttagacactgctcttctttctttgcaggggcaagagttcctgaaaaaggaaggcaggcaggagaggggcgggggctgggggtgggtggagagcttccatttcccctgggggtgtttgttccaaataatggggtcccactcagttttttggagggtctgagtgccttagccatgcgtttcccgaatggcgctgccacgctgttccacatacaggatattttcaaacctctcatcctgccctggtcagactcgaaccaaacggttttgacgtccaccgggctgttaattcccacctgggaactgcatggaggaacctggaggtgcacagcaggatttagacttgggcttcttctttgctctgattcctattgtgaaggagaaaaacttgagggtggggcagagaaacccaagtagtaatagcaaggcagactgatgaaaagaggaaggcttcaggtggaaggagataaggtgtcccgttggggcagctgcaggaatcagttgaacccaggatgatcccaggttatcacagagtctgcaactgggatgactgggtttgatcttgaagcttgttggatgagggcctgtgtgggggaggggagcatggctgcctcttgttgagagcactggtccctcaagagaagggggaaagagctgctagatcatgagggctaggttaccctcactacatacctggtggttcatccatgcctgtgagaccatctccagggaatccagtgttctcttctagctctggcttctacagtcactttcagggacacaggcacgcgaattagagtatttgactaaactcttgcagccagggcctatgggtaaggactacaaggaagggaatgagacgctagcatagcatggcagcaaagctcggagaagcatttcacgagctgaagagtcagaggagtgtggggctgtggttctaacttcagggcacatcatctgccaactgcagggcttgcttgcctccaattactgactacactggagtttcatttagtaggtctggagcgaggttcccagtttgcatttctaagaagttcccaggggtggttgctagctgctgctgggttttctggttgaggaaatgaagactacattaaaagtcactgaatttggccagcatcagtttcaaatccaacttcccagcctcctggctatatgattatggctaagtctctctgtccctcagctttctcacccatagaatggtgcctgcctcctgggggttggaggcagtgctgaaggagggcctgtatctcttggtcaggagacaagttggtgatagattgcataaggagacttgcttggggcaggtgcttgatttaatcaagtgtgctgggcaattgtgcaattccactgtgctagaattctgtgtcagaggagggagcctgtgtcctccatgaagctcagagaaggtacacagcaggtgctctataatgacatggaagtgacatcagtctcctcttgccagggtgtggaaaatgagcagctgagtgggcctggaattggtgcaaagttatttaggctatatttctttggcctaaatgcaatcacatggtctcagcaaggtgcaggagacactgggagataaggtcacaggctgagccaattgaggctgctctaggcagcacccagtttgtccatgatgtcttgagtgctggattcacttctcagtttctttggaatgaaaaaaagaaaaaagaaaaggaaaaaaacacttggcctggggatgtagcccagttggtagagttcttgcccaacaggtacaaaacactgggttcccttagcccttgcaaaaccaagtatggtggtacatgcccataatcccagaactcaggagatagaggcaagaaagtcagaagttcaaagtcattctccttcatagcgaactggagaccagcctagatacaaaagaccctgtctcaaaagaaaaaacccataattgaaagctcaagataggctgcactgtgtatgctttggccagggctttgaagcagggttctgctgttaggaatggatcttgtcataaacaaaagactttatagagcaggctgtgatggcctgtgcctggaccccctacccttatggcacctttactgtgcagtacctggttggtgtgactcagttttcttctttggtctctgtatttttgagtggggtggggacataaagcttcgagtgagggactcaatggtatccggagcctcagcatgcactgaggagtcatgaatgaaccgtgaactattaaaactttacgtcagagtgaaaggaccaagacgtccacactggcttcctccatcagattgcatgtctcctgtctaccaggtccagatcaaacctttctcatgagtttgccttctccttgccctcacacccgcaggttctactgcttggagtgctttacccacaggggccaaacctgtctgttcccttcaggaacacattggactcttacctccccaagagggccttccctggggtcattttcttttgtgcagattagctgacagaaaagtagctaccccagggagaccaaccccctcccccaccatacctagcataggattagtgctggaaaataccagctgctattccatcctgaccacccccactcttctcgacccccacccccctgcatacttcttcccaggtcccctgcatgacaagttccattacacccagaggcccaacaataacaacccctctaaagatgtccatatccttgccctgggaatctgagtgtgtgtggccttatccagcaaaagggacttcttagagatgagtcatgggtcctgaattatcttactataccacagggtccttataaagaggaggtagaggccaggcatgtttgcacacacctttagtcttggcactctagaggcagaggcaggtggatcccagagtttgaggccagtctggtctacagagtgagtcccaagaaagccaggacttcacagagaaaccctgtctcaaaaacaacaaaaataaataaataggtagataaataaataaagaggtaaaagggtagagaagagacatgaccaaggaagcatgaactctgaatagaaatatttagggttaggtgttagctcagggttagagggctagccctggactccatcttcaacactgagaaggaaggagggagaaagaaggatgcagaggggaagggggaggagggaggaaggatgggaaaacaggaaagaaaggaagcaggcacagctccttgaagactccaggctattggctcagcagccagtagaactcctgtcccctagttgtgagacccgagcttgggtcatttgcatcagcagctaccagatgctcatgtgactggaacaggctccggcccaaggctgttccactccatcctggctcatggcaacatctggagtcagttttagttgttctgattcaaatgcagctggcaactaatagatagagaccatggatgctgctaaatgtttgatgtcccacaggatgtattgtccttgtaaataagaactgtactagctcattgtcagtagcacagaggcagagaaaccatgctcagtggggaagagtttgctgcataagcatgagaactgagttcagatcccagcacctacactgggatgtaggctgacaggatgattcctgggacttgctggctgccagccttgctccagcctcattgagagacctcatcacaagggaataaggtagtgtatgatagaacagggacactcagtgacctctgccctccatgtataaacagacacacaccacaccctcctctctcctccctctctcttccccctccctctcccttccccctccctctccccttctctcttcttccctccatatattatacagggacagaaacatcagcttcctggctagcaggaacagcaatttgcttgtaaggccaagggctaagtcaacgtttattctgctgaaatgcaagtgctgcaccctggaccctgctcacacaaacctgtcattgtgcaagagttctttgttttaaaatcagcaaatgacattttagagtacaaagcagaaaagactgtcattaaggcttcaatgagcaacatgcacaaggggcctttggattttaatgtttaatcatcttctaggcactggcttttgtgtccccaggacatggtgtactcctggctggttgcaccaaggatacagctgcagcccagagtgccaagtctggcacaaaccatttgtgcaggtggcaggaataaactatagagaagctggccatctccagatggcatatggggcaatgaggtgttaccgcctggggagtcagtggcccagtagcatggttgaggctccaagagggaaaaccaaaacgtgaaaaaaatcaaaagactataatctggcccaacaagacctgtgagacaaacagatctgagttcaagtcctgattttgccatggctagctgagcgacattgggctagttacttaattcttctgattctcggtttatttacaaaatttgttcatctcttagagggaagcagagcaggttgaggaaggggtgacagtggctcctgtcattgtcacacacttgccaacatgcctagtgctgcatttggcatgcagccagcccttcaaatgtatgatttgtcttgtttctgtgaaaatacagtcaggtggagggccattggagcccaggtttttgcttccttctcatccacctacaacaacaaagtctcattatccctctgtctcttggcagcaggaactcatgctagacttgaggaaggtactgccaattctgttgggcagaaagttcatccctggcacctaaaggatcagacacagccaccactgggggtggaggaagcagagagaagtggggttggggtggggctgagccttgtttatcacaccaggaaatccacactgcaagatcttaggacatagatgttgggtatgatggtgcagccctgaggaccgtgtgaggcaggacaatgcagagtttgagaaatagatataacaggaaacaacaaggatgggaaagtacattattttgacttatggtgatacccaccaagaacacccctgggaacagttaacattgcagccgcatctaagtgtgggaagctttgctgcctatgcttagtagcaaaggttgttcacaagagttgagaaatatgtgatctgtgtggcattacaagtggccctgataggaaaggggtgttattttcaaccatgtgctttaggaaaagtctttacttttttctagtactggggatggagctcagaccttgcatatgctaggcaatggctctgtcattgagatacaaccccagcattcataattcccgcccagtatccagacagtgactgggaccaaaaacagcaaacacaggacgctgaagtccacccagccctccttcagggggatgacagcaatttgagaggacaggctcagtccccctctctgagtccagagtaatccttgaagtggagggggaaaagattgacttcatggtagacacaggagcaaaacacttggtcctcttaaaagtcgaggcccccatgaccatcaagaccacctgggtacaaggggctatgggcactaaagcttaccaatggactacccaaagattggtaaatctaagaatgggccaggtaacccactcctttctagtcataccagagtgcccatactcacttctgggacaagacctcctttccaaaatgagggctcgggtcacatttttggaacaaggggctgagctcaggcatgcagacggtaccccagttcgagttcttctgattgctagcctctcagaagaatatagactacaccaaaaaggacagacggcaccagaatatacaatctccaagtggttgatcaaatacccgcaggcatgggcagggggcgggggagaggggctccaattttggtggaactgaaaccaggaaccaagcctgctcctgtccacgactgcacagagatcctagctcaagtgcacaacatctgaccggacatatgctggacttggctttaaaaatccaaagtcaagattcagaatggaaaccaggccattgaggaaatagtggccagctgtctgtcatgcatgcacctgacaaatgccacccctcaccccttaaacccaggctcctgcttaagaggaacaaagccaggaacatattgggaaatagatttcactgagattaaacctggtaagtttggctataactatcttctagtatttatagacactttttctgaatggactgaaacctttccagtcaagcatgagactgctcaggtggttgcaaagaaacttctccaagatatcctgcccaggtatggttttcccaaactcctagggtcagataatggactggccttcatttctcaagttaagtcagggaatagccactgcactgggggctgattagaaacttcattgtgcatatataccccagagctcaggacaggtagaaagaatgaatagaactctaaaagagactctaactaaattagccttagagactggctcagactgggtggctctcctatcctttgcgctcttcaggtacagaattccccctatcagatgggccttacccctttgagatcatgtccggggtgcctcctcccataattcctagccagcagtctgatctcttggccagcctagatgatcaggacctcaccaattctgttcactgactacagctgacccatgaacgggtatggccacaacttggggtcatctatgaagctactgctccccctgagccccacaggttacggccaggggagtgggtccttgtatgcagacaccaacaccaaacgctggggccgagatggaaggggccttaagtagtcccgatgataacaccaactgccttaaaggtggatggcattgctacttgggtgcactacttccacaccagactagctgacccatttgtcaaccctgaggactacaaaggaaacacctgggagtcattgcaacattccaccaatcccctcaaactccaactccacaagaagccctcatcgccctcatagtcctatggtatctgatgctgacaatccaagctacatcccctacgcccccctccaactggacgtggacaataagcacccctgaggttcgcctggtaaaccatacccataccatctcccctgatctccccttcctggccttatatatggacctctgtgacttggttcaggacagatggcaaaactggtgtgggtctgcagagggccaaaatttttatttgctcatgccagttctatgtctgccctggccataagaaagggtatggtggggcagaatactgtgcccattgcagatgtgtgactacagggtgggtctcctggagggcctctgtcacagatgattacataactgtagggcagacaggcaaggcacaatataatggcctaacattacagcaagccgttatcagaacctgtatcccaccaggacagaactccaaattagatggagaaggaaacgattgggagccatgtgggccctgctatgatagcataacctcgcctaccatagccctggctacctctgggggccattgcaaccagttagtcatcagattcactgaaaaaggaaaactagtacccctagatgattgggaaaaaggccagacttgggtctcagaatgtatcaaaaaggatatgactctgtaacctgtttcagcattgccatccagcaattctctctccaaaccaaagttggcccaaacaaggttattaaaccctggcagaggtagccctacagaatcagagggggctagatcttttattcctgcaacagggaggcctttgtgcagctctaaaggaggaatgctgtttttatcgagatcacacaggtagaataaaagacaacatggtcaagatcagagagggactagaaaagcgcagacaggaaagagaagctaaccaagggtggtttgagtcctggttcagcagttccccctggatgaccaccctggtatctgtccttacaggcctcctaatactcctcttgctcctaactttcggcccttctattaacagactggttcagcttggaaaaagactgcctgggcacaatccagctaatggttcaaagatcacaaacctaccaacttttaccccatacttctctagaatttttcgaattgtccactagagacccaaaattgggtcacctatgatacacagagaaagggggcattgagagaccaggactgctgcctgcttagtaccaagaatggtcagaggaacctgactccttggcctgaatacatgacaaatggcttgtgtcaaaaccccccagttctcaggaaaaggagtccaccccaagctatgtcaacaattccctgcaattgaggctcaggtccttctcctgcagctgttgtgccagcttgctgggctaggtccctgctgaggcttgtattcaataaacaaacaaacaaacaaaaaaaacttgtgcttttgcattccgtgagttggctccttggtggtgtttttgggggtctctcggactgagcataacaagcaacaaaccaacccttccctaaagttgtacacagcctttctgcttctgtttcagtaagctcaagttaggtatatagtggtgttaaagtatttccacagaactgaaacttcccctggagggagaagctcagaaagcgacaagactgatcaggctgctcctgaggtggttatacagacagtgagcagttgctggggaacagacactctgcagccagcagagcagccctccccccctccccccaggtaggcacagagctccaggttgcagctttcatgagtcctctcaccttgctggggcaggctttagatgatgcaattgcctctgggtcacccctgctcctgtaagtgacccctgttggtttaccaagctggatttgggaggatcatttcttttgtctatcatcacctccattaggagtgaatagacagttgttcacatctccccaggaaaagtctcacagcttatggtcttgcctgcctgtagtctctaaaatgtagccgttatctgagagactatgtacttagctctgtaggagcaaacagctttgggagttgataggtggtgcctcagcttccttaagagcggattcagggcacactgaaacccacaaaaccaggttcactcggttctggatatgtaacaagtgcctgctgggtatgaggcatagtgccaagctgtcacagctgctgtcaacagcagctcctggtccccagggtcaggagggtgtttatctgtggttctttctcacggcttctatgagctggctgtggaaacacagaaaggccacttcctcactcagctgctgccacagttgagcagtgcaggagggatgccacatttcctggggtcattgctgaagctgtgggcatggcaccatcctggctcctggagctgttgacctggtggagtctactggcagttacaggtaccatactgtcctggtctctaatgctgactgggacagagcaggctctgggctaggagctgcaggctccaaagaggatcaggtggctttggcatctgttccaggctggttactgtcctgctctgagggtagaaaacaaacttggcagctgaatgaagtttcaaaccagaagtagagaaatcaatgtgtggccagcacactaaggaaaaggataaaaagaaacaaaaacaggctcaagttaaatagatagcaagagtgcattttataaaggaaggccaagtacagggttttgagattttactttccattttaggagtatgtacagagttagaatttaaatgtgttctgattcatagctgtcaaagtgccaacgccttccgaagaaagacatggctgagacaaaaactaaacactaggccaaacacagtggctctacgaacatttatgtaaaagttataaaaaattattattattattattatttattttatcttttttttttgtctttgtttttttgtttttcgagacaggttttctctgtgtagctttggagcctatcctggcacttgctctggagaccaggctggcctcgaactcacagagatctgcctgcctctgcctcccgagtgctgggattaaaggcatgcaccaccaacgcctggcctaaaaacttatttttaattgtgtgtgtacattaatgatgtgtaagtggggacatgcataccatggtgtgcttatggatgtcagaggacaatttgaggaatcagttctctttctaccatgtgcattctcgtaattgaattctcattgccaggcttgtgggacaaacacccactaagtcatcttggcaaccccttctcatgtgtgtgtgtgtgagagagagggagagggagacagagacggagaaagagagagagagagagaatcttactgtgtagcctaggtgggcctgtctggaactcactatgtagtccaggctggacttgaacctgcaatcctctcacctctgtcttcagagttctgggattatataggcatgagccaccaaacccagcttgtttatgagtgattgtgaagacatgttttcatttcgtttgagtgcaccctgggagcagaattgctggaccataaggagctgtcaggctgttttccatagcaagtacactattttacagttccactagcagctgtgggttccaattcctggacatccttgcggatttttattattgcccagtttttaaattatatccgtcctagtggggtgtgtctttcaatgcatttccctaatgacatcttctcatgtgtataccagctatttttatgggtttaaaattattttttcttacctccctctctctgtgtgtatgtatgtgtgtgtgtgagcacacacgtgtatacatatgcctgtgggagcatatgtatacacatttgaacagacaaatgactgttcaaatcctttggccatttttactgttaattattgattgtaagagttctttgttgagtcatttatcgagtttatgatttgaaaaccctttttctcattttgtaggttgtgtcttcacttttgttgtttatttgtgtgtatatctctctgtgtttctatcccccataagcacccaacagaggctggaggaggataaccacagctattctgtgaatgcatttgtttctttctcttagattatttacttttttattttatgtatatgagtattttgcctaccccatgtgtatctgggcagaagcaagtgtcaggtcccctggaactggaattatgagaatggttgtgagctgccatgtgggtgttgagagttgaaccccagtgctccgcagaagcaagaaatgctcttaaccgctgagccatctctcaactcccctctcatataacagtccttcatcacacacaagttttttattttaattattattttgttcctagtactttggctgccatgttgaagaaatcttgttggttatggtgacaaattgcctgtagtctaggcaactaagaggtggtgacagccaggatattgtgagttcaagaccacacagaaaattagaggataacctgcactatatataataaaacttaagtcaaagaaaaccaaatacccaagggctagactgccctgggctccatccctagtaccacccccactgccgcagccaagtcttgcttaatccaaaactatgaagatgtcctgtatttcctgagtttagctcttaatgctttactccttttattgttttgttttttgagatagggtttctctgtgtagccctggctattctagaaattgccttgtagaccaggctggcttcaaactcagagatcttgctatctctgcttgctttgtgctgggataaaaggcttatgccactaccaccaccaaggtgctttagtccattttcatttaacatttgcatgccatgtaaggaagggattcagggtctctcagccccatttgttgaagatttttcttgcccaattcagtcattttagcatctggctgaaagtcagttgaccctatgagtgtgagacttccttcttacagtcttgctgcactgtctcctgaccatgttggtgtgtccttgggttctagacctccctgcttctagccaccacacagtacctcattgtgtagaaagaaacactaatttatataacaggctttcactgatggacatttgggggcactagcaatttcttgctgtcattgatgttattggagcttcagaggacaattgttcatttactgacaggaaatacattgttttgtctgtgccaggtactttctaagacaatcagtgggcatgaggataacagaaggaaaaaaggcctgcaagatggctcagcaggtaaagtcacctgctcctaagcctggtggcctgttccatcctgggggccacatggtaggaaaggagtcagtcaacttccacaagttgttctcagacctctataccttctctgtggccggcacatacctgtacatgtacacatgcacacataaataaaagactcatcccatgagatggaacccatgcccaacactacttgggtgaccaaagaccagggatctagggtaaagccaaatactactattcttttactttttctttttcttttttttttttttaaaaaagactcctattgacattctgctatactctatactactatgctatacagaggtcagtgctttgctcagccatcatcagagaagcttcctctgcagcagatgggaacaaatagagacaccgcagacagacatcatgcagagagtagagaaagaatgtgggacactcagccctaaattggatgtctccatcatatctctcccctcagggcttgtggaacctcactagaagctgtgaaagagtcagaggtgatgaaggacaccaagaaaacaaggctctctgaatcagcatgagcaaggctcacatgaactcacagagactgagatagcatgtgcagggcctacaggggtctgccacaggtcctctgttgtgtatatattatggcttccagattagtgtttttatgggattgttgggtgtgtgaatgactgggtctctgattctgtgccttctcttgggctcttttccttctgtttgttggtcttgttcaacttcgatgtaatggttttatcttattatattttattttgttatattttattattatcccttggaagcctttccctgcctaatgagagacagaaaggaagtgaatgcaggtaggaggggaggtggggaggaacagggaggagtagagggaaacctctagtcaggatatattatgtaagaaaagaatctattttcaagaagaggggaaaataagtgtaataaaagaaagtacacaggacagtttcaactcaggaagactactgagacaaaaataaaacagggtctttgacttggaaattcggagttctctaaagtggcatcctttgggctacaacccaataatgagaaataacacagaaagttgttccaggcactgggaacaaatacaaaagccctgaggtggggatgcacttgatgtgttcactgaatggaaattaactggtgtcctcagaagagcagctaaggcctgaggatgatgggcaggggtcccagctggtgcagtctttggggagttactggagggtggtaagcagaggagtgatttgatatagtttatgtccttaagagatagctgtggttgtctgtgaggcgcgtccggtttccaagcactcaagagttctccgaagtgaagtgactgggccaataggcttggacatttaaaatgttcctcctaccttattgccagcttgttgctaacagcctccccaaatgattgttctgggttttaactctgacggtgtggccattgccagtgtcatgcaggtatccagacaatcctcacgcccgggcgccagcacccaccctccactctgcttcccttgcaggaccgtccttgctgcacctgcgcagtaactctggctgcacctgcgcagttactctggctgcacagcggacccctcaggtaacacaggcgcccctgaaacatggcagacgaagacctcatcttccgcctggaaggtgttgacggtgacgggtcctcccgagctggccatgatggggattcagacacagacactgacgaggatgaagactacttcatctgccccatcactgatgaccccacgtccaaccagaatgtcagctccaagggccagaactactacagcaacctaatgaaaatggagtgcggctccacagggtcaccagccagctccttccacttcaaggtgagtggccacccgttctgcccttgtgtccagctcacctattatgaaggatggggagttgggttctctaattgatgtcctaattgtctttaaaccctagcagtgcattctggatgcgggagtgttcctgttaatctgggaggtgaccgttggtttaagatacattttgtcaccacagagtagtgtttttcaaagagattgaaaaccatttggggctggtgaggttgactccgcaggtaaagacacttcttggtaagcctgaagattggagttggtattccccagaacccacataggctcctgtaggtagttttctgtcctctacaattatgttgtaggacctacattccccccacatggatatgtacacacaataaattatgaataaacaaatgtaatgtttaaaatatctgtttgaaagccttgccctgagtcttacattttctgttttctgagaaatggaacaagatagaacttaatagaaaaaatttcagagcactgtagactacaagcgtttcattccttgggtattgtatatgcctacctgtatgtataaatttgatgagctcattaattgcttatggctagcatcacaacattcaagaaagaattggaacaaaacacagtgggaaatattaaagagcctttaaaagcataaggaccttacttctcgtggtttgttgttgttaagacagggtctcatgaagtagccaagctgataatggactcatggtcctcctgcctcagccttaggagtgctggagttacaggtctgcaactggctcaagattatttcttttctttctctctctctctttcttccttttttttttttttttttttgagacagagtcttgtgaaatctcagcctcactatgttgccaaggatggttctgaattcttaatcctccagcttccatctcccaagtgatgagactatagagccaccagactttgctaagatctttcttcttggagcatatgtacaggaatcgatccttatccatgagcagtgtgttctaagactgtagggcattcatacctgtgataaaggcttaacttatatattagatacattaagatattaacagtcactaatgataaaataggacaattataacaatatagtataataaaagctatgtgctggggcgtggctcagtggtaagcacttgctgcccatacacaaggccctgggcactgtctccagcaccacaaagaacaaaaaccggaatgaacaaactataaagttgtggatgtgggtctcgctcattctcttaaggtatctatcatattgtactgtgtacatgtagatgcttctgtaatatctcattgaccacaagtaactgggaagccacagataaagggggccactgtcacacccttcacaaatacaatatagtggcttgtttttggtgatgtgcttccagtaaagactcacgattttttcaaaaaagcatgtatttaggtctggagatacagttcagttggtagagtgcttgcttggcacacagcaagccctgggggccatccttagcatcacataaacacctcaaacatgagaggtggtggcagcaggatagtcagaagtttgaagtcgtcatcagctctatctcaggtttgagaccagcctgggatatgagaccctgtctttaaaaaagacaaaataggctggaaagtggctcgtctgttgagaatgcatgctgctcttgcaaacaacccgtttgaatcccagcactctcttcaactggctcattccagccctatggggtctgatgctttcttctgacctccatggacaccctggtacacacgtggcatacacacccacatatgtacatgtatgtatacatgaaattttaaaaaataaatcttaaaggattttttaaaaatgaaaacagataaaaacatgtattgaacctcatgctttcattgaagcccatttaacaagtatgagctgaggtactgaattacatgttttaattcagttgcacttattgatggcctattaatgcttctaatattagctaaacactgagtacagtgaggcaaacagttgtgtgccattctcctcatgatttcacctgtgaggggcaggctgaattcttgttaaccactatttttgaaacagtaacttagattgtttacatacgtaggtgtttaatacataccacttccctttctgattttacatcccagcatatggccctaaccatttattaccgactgcaaagtaaaggcttttaaaaggacttttaaatgctagaggtatgtgcatgctttgcatgtctgggatcctaggttccgttcccagcaccactacccatacacaacagtgtcctttgcaatagttaactaccctcccctgcatttatttacagatacaaactcactttggcagttctctgccttggatattgttggtgtttgagggtgcaggcacaggaagcaactctccactgtcactctcagcctgagggatcccctagccctttaagaaccttatctcatgagtcatggcttcaacacagggaagaatttcaagactggccagtttctgaagcagggttgggttttttttttttgtttttttttttgtttttttttttgcctttagagagggtctcaccatgtagtgctggctgatctggaatttactgtgtagaccaggctgggctcaaactcacagagatcaaactgcctttgccttcctagtgttgggattaaaggcatgtgccaccacaatgcccagcagagttggggtttaataagttttttttttttatttgcatatatgtgtgcagtttacctgttcacatgtgtgtgattctatgtgtgtgtgtaagccagaagttgacattggatgtcttcctccatcactgtctactctgtttatttatgaaatctattgattctggctagccaggttgccctgaggatcccaagttctgggattacaggcagctgccatgcctacatggcttttgacatgggtgttggggatccaactcttaccttcatgcactagatcactgagccatgtcctcagccctaataattcaatatagacttaagcacaagggttgagagaaagagaggtgctcagaaggaaagataagacaccactgagagcgagtgtgggtatgcttcttggaagagtgtagacggacagatggagatgcacaccctgctgtaggtaccagctgctcagctccagttttttgtttgttttgttacgttattttttatttttattttatttttttttacaacagtcatatattggattttggtgaggtttgaagagttagaaatgttgagatcactgagtgtttcctgagggctacctgcagggttacagttggtaatgtaaatgtctcactcacaagggtacagaaggtgggacatcattgtaaacaaagttttattggagaccttggtgtggtggctggggaaggaattcaggcactaggcaagattctatgcatacaggcctaaccctgggacattgtcatttactataaaatctctctccatggaaggaaaattaactccatgagcaacttatacatgaaatgtttattgttgcgggggtggaggttcatggctctcagttgatgagtggctttattttaactttactcctgggtgaagtctcctttcccttcccatgtcccatagtttccctgtctttctatcctgcctcaaaatcgatttgtctaggtgtatttttattattattattttcattttattttcaaaacctggttctctctgtagccctggctgtcctggaactcactctgtagaccaggctggctttgaactctgagatcagcctgtctctgcctcctgagtgttggtattaaaggcatgtgctactgcacccagctaggtgagatttatgatgtcaaatgtagttcttcattttggttttggccagaaggccattctttaaggttctgactgaggaagaggatgtttgtcttattaggagttctgttcacaccctggcaatgccgttgtaaaggagagggaggaaagtgagcattactgggctttgtataataacatggagaagttaaaacacagtgctgttacccttgtttcatttggtctttatagacctgttactatattgagacttaatattaaaaccatcctccatgacttcagaatttatcttcttagaaaattaataattttagttcttacagacaaccagggaaggttttttttttcccccttcccaggcctagagttctagcttaacttgctctcaaatcacgtagctccaaaaataactgtctcctcggggtttgtagggactctgaagggcaggttccagtttatcctgcttcccatgcagaagcagctttggaacatactcccaataccccagcactccaccccaagtttccccttttcccagcttccatctccagagacgctagaagggctcagtacacaaacagctccaaagcccatacagagagatctctttaaatgacacatagtgattctaacagagagacacatttacattaaagtcagtgatgttgctaggtaatcgtactttaaaaaacatgtctgtaaatattcagggccttgggatatggctcaaaggaagaatgctttcctagtatgtcctgggtttcatccctaacaccacacacacacacacacacacacacacacacacacacacacacacacacacacacacacacacactcatgagctcaatacactaattaaagagaaaaataataacaaaaagcagaggaaagagaattactcagtgcaaccacataacacaggaacaataagaggtctggtggccctaagtctctggggcaatgacacatgaggtttaggtttaaacagaaggctagaaataggcataactaagcagtcttggctaaggtcaagggtcatgctcccagcattgacccactgtgtcttggcaactgacctgttgtcagaactgtttgaactctcttcctgagaagtaggcccctgctcgggctgacacctgggatttagccttttccttttcccagcatgaatttctggggaaattttaattctatggataatctgaaaacacactatctctctttaaattatcttctctctctccagggcagaacctcaagctcaggaaacactctacaactgagttgtgtcctcggcccccaaaagttttcagaaaaactagtgcaatgtcaccaggccacattacttcccttcacatacaaaccccaaatagcctgtccttaaaactcctcacttcttcaacgttgagttcagaatcctggcagaggagctgggagcaatttctgggttctattcacctcacagctcagagctcctggagtaggcttcattttgcttgcctctgcctaaaacttccaattgaggcattgttcaaggaagggctccctctgtgttaccttggactctcagcagactccttatgttcctgtcactgttcagtgtcactccgtgagtcagctcctaatttcaggctgggggctattgatggctccaccattcctttaacttatatataaataagaagcagttggtgaaatattgaaccaggcacagagtggattaagtcttcattgctcactgtcttatctcactgaaagcaggctctgttagactgttgccataggagggggtccagggaaaagactataggttagtttctaaacctcatttcctttggcacttaatatattattattattgttatttttaatttactcttgacatggtaacctgggttgttgaaccaaaaaagaccatctggccttcctccaaaacacaggccccagcaggtactgggtgtgtattgtgaaatgtcaggttctgccagcatccgtgttcccaagggattgggcagaatcactcagaaggcctctcagtagataccagccttcccctcagaggaagtttgtcctatgtgagaaagggcctcaatctcagagctctacacataagagagacagagacacaaagagacagagagagagattggttgattttcagatcgattaagaaagagtgtcactatcagggattgctttagggcagaatcagatagggtgactattcttttcttacaccttagacagttttacattttctggtttgtttgtttggttgatttgggtttgaaatttttattctttgagaatatcatgcatatcaagaatttcgatcatatttatacccatcccttctgctctcgccttccagatccacccctcccccacacctccccacagtggtttgggcttttatttttgttgttggtttttagagacagggtttttctatgtagccctggctgtcctggaactcactcagtagactaggctggcctggaactcagatatcttcctgcctctgcctcctgagtgctgagattaaaggtgatcaccaccatcgcccaggcttagtttgggctctgtgagagggggtgtctcctagctcaggccggcctcaaactatctgtagtgaatgaccttggactcctgatatttctatctccccattttgaggactgcaagtgtgtgccactgagtcattgtgagttttcctctcccctcccccattacaaatcttacttattcttcattttacatttatttattcatttattgtatgtgtatgggcatgtgtgagccctggcacttgcatggagatccaaagacaactttctgtagttagttctctccttccatcttcaagatccaggtattatcacgcttgtatgagaagtacaaccatacttgacagccctattcagtccttttgaaaggtctttttttttttttttttcttgcagcactagggattggatcccagagacttagacattctatgccagccctttgagaaaaatatcaatgaatttgttcccccttactacaaatagcataataataaatacatatacagtctttatatatatgcaaatgtattcacaaactgtatatgtgtaaattatacaaatgtattttatatttggcaaattcacatttgtaaactttatttttttcacgtgtgtgggtgttttacctgcatgtatgtctgtatatcacttctgtgcccactacacttggatgatagaagagggtgtgggaccccttagaattagttgtgagctgccatgagcatgctgggaatcaaacatgggtccattgcaagtgcagccagtgctgttaaccaccaagctgtctctgcagctcctatatatgtaaacttaaaaaataaattttataatatatatattctacacttaatgtatgtacaaggtaaaacagatctaaactttaaacaagtgaaaatgtgcccccatctccgcccagaatgtgcccctccagaaaggtctgttgcttggccagggtgtgttcactctcgcccagactttctttttattttgttttcgtggagatgtcacacactggtttccaccctgtggccagcctcctctatccccttgggagctgacatgaattctaacttccgtagcttggctgtggtctgggcagtctctgcagtacgtgtcttacccgatacagtgtacacgatgatccatagagccccagacagttggcagtgtgccagatggtaaattaaaatgaagtcacatgcctgggaaatgacaggactgtgttccggtcctggggattctcagagtgatactgttaatagctgcagtttgcatctcactacatttcatggtttgtgttttgtttttttgttttcactgtttatgatcaagcccagagcctcatgcatacaatctttcatttgtttgtttgttgtctttaatggctgaatttcattttgctggaggacagcatttccttgtacatacagctttgcctatgcagggatacacttgccagagaatgtacttactagccatggagtggcttggacagaaccttgaatttcaaattttgtgggaatggttgattgcaccaatgaactgccttgctctatcttgtacctgcttcccacatcccgtcttcaagtgctgttaatgcacagagagtggttctaacaccttggtttaaaacaaaacaaaacaaaacaaaacaaacaaaaaaagcaaaactacagtcactccagaatgagactggccaaccagggtgtgatgactcactgggcagagcagtgtccctgcctactgagcctaacaggctccaccctggtggcctcaggcctcagaccataaccataggcagtaagccagagatagttaactgttttttgtgctttgggaatgcagtcagaaaacaaaacttatgggcctggtctggcttggttggcagctgagtggctagcgtgctttcctagcaagactgaggacctgggttcagtccagtctctagcatcttaaaatgataaaaagaaagatacttaaaaagctttgatctcctgcaagatgaaaacctgctggccagttgaaaaagagtcctgctggcatccctgggtgggatttggcacacaggaggagtttaaagtggttgaaatcatgctgtaggggcttacatttatcaaggaatgtgttgaaatgctttggtgaagtgtgcaaggcaatttattgacaagtcctccccctcccactttcttttattttcacttttttcctagcaattttatgaaaatgcaacccatatgtcatacaacttacccatttaaatgtacaatccagtggctttcagtatagtcatgcaccatctctgtaactaccgttgtcaaaagctgcactctcaggcatcactcacatctgtggtctgcccagccctcgagaccactaatctgctttctgtctctatgacattgccttttctagacttaaaaagtattacatttatttatttgtgtgtcatactatgaaaatagaagtcagaggacagcttgcaggagttggtagaaggagaagatcctaagatcaaacttaggtcaacaaggttgatggcagaaggtctttacccactaagccatcttgtcccacagatgctttgtatacatagccattctgaggtgtggcatagtaactgtgttaacttcttttgccagccagggcaaagcttcctttgtctgtctcacatttccaaagttttctttgttctctgaactggaattctcccacttatctctctgtcctcacaaattgctgtgagatgctggtagaatgctgtctgggtaggggctcccaagaggccgtggcattatgtcaccctagtgaacgctactgtttgatttttattttttccatctttgcctttcttcctaacaagggctctgaatcccaaaagttacagttgtagccactctttgcaaacaggattttcagtttgattgattgatcttgagactcctcattgtgtagcattggctggccatgagcatgctatgtagaccaagctggccttgaactcacaacctctgagtgctggacttaaaggcatctgtcaccatgtctgattattttgcttttgaaacattgttttatttatatattgtgtggggcgggcacacacattctgtggcacgtgtctgaggtcagagaataacttggctcagttctttccttctaccatatgggtcccaggaatcacactcctgttggcaggcttgggccgagcacacgcacaaacacaaagaaggctgggactatatatagttcagtgtcaagagtgcttccctagcacacaggaggccctaggtttagtccccaatactagaagaagaaaaaaagtcatctttctgctctgtggtgaacatcacatggatgtactttaatattgtggtttcttcaatttcttgggatttatgggatattttgacagtcgctgggctccacagatgaatataaaagctgcaaagtgcatgtggcatggtatgagaaagccatacagcgctgttggtctctctcatcctagcttggtgtgatgtgatcttcacttcttcctgctttttgtattttcccgtggagcctggtgtgatcctctgtttcctccaggaaggttagcctgggctgactcaagagttgtatttcgggggctggagagatggctcagaggtgaagagcactgactgttcttccagaggtcctgagttcaattcccagcaaccacatggtggctcacaaccgtccattatgagatctggtgccctcttatggtgtgcagatatacatggaagcagaatgttgtatacataataaataaaatctttaaaaaagttgtatttcttagaatctccagaacaacagggagacagaacatttttaatggaacagttgatcattgaaggagggcttggttggttcctggatgcttcataaaaggctacagtttttgtgatcatggaaataataatgttaaaacaagggttgtagctatagctcagaaggcagagtgcttgcctagcacacatgaagttctggttcaagccctgcataaacccagtgtggtggtgtacacctgtaatcctagtacttggggaggtagagatgggatggtcagaagtttgaggtcacccccagttatatcaagtttgagactagcctgaattacatgagagcctgtctcaaggaccaaaacaagaacaaaaagcccaacaccattgtcacttgtgcctaggtcctcgatgacactttccatgttcttctagtgtcacccctgtatctcctaggagttcttagacttggaagagtcaagcagcctttctattccctttttaacttacttgtgtgtgtatgtttacaggcatggatgtgctctgtgtgtgtgtatgtgtaggcttaggttttctgtcctcacatgcatatggaggccagaggataacttgtggggatctgttttccccttctatagtgtgggtctcagagattgagcctacatggtcaggctaggtgccaagtaccttcatccactgagccatctcacctcagccctctattctctccccatttttttttttaagttatgtttgtttatatgtatgggtgttttctctgttgtacatcatgtgcatgccatgcctacagaggtcaaaaaagaacattggatccccttggaactggagtcatagatgattgtgatctaacaaagacttcttgaagagcagtcagtgctcttaaccactgagcctctctattcctttttttttttttttttttttttttttttttttttttttttttttttggagacaaagtcttgccatgttgctagctgcatttgaactcaggagctgaggggctagagctacatttgtctgtaactattctggactccttcctcttatttatgacaaaccttcagtgcctgcaaaattaacttgtctactcagcagtagagatttgaaatcatttgaactggagactatagagctggtagaggcttaagaatcatctgactgctgggagtgtcactcagtggtagaacatgtgcctgcatgatgaggcccagggttcatctccagcagtatcaacaaagactcactttcaatgattgttgtttgctgactttggattacactttcatgactgagaatatagttcaatggtagaatgcttgcctagcatgcatgagaccctaggttcaatctctagcacctctctctccctctctctctctctctctctctctctctttctctctctctctctctctctctctctgtgtgtgtgtgactgtctgtctgtctgtctgtctgtctgtctgtctgtctctgtctctgtctctaactctcccctcccccaccacacatgcaatcctggagtttgttctcattgtaaaacatctgcagatagttttcctggccggatggtaaaaacatcacagcagtgacagtgagctcagacaaagtcaccgctgatgtgcattgccatctcaaagagctactttcctggtgggagcatccatcctgggtgcaggaaccgtaataaacattgagcaccagttcctaaaatctttatctttatttgtcaacaaaagtgtgaattttccagagaccaggaccaaagggcccacatgttagtgctagacttttatttatttatttatttattttgttttttccagacaggatttctctgtgtagccctggccatcctggaaatctctgtagactgggctggcctccttcgaactcacagagatccgtctgtctctgcctcccaagtgctgggattaaaggtgtgagccatcaccatccagcagactttttttttttttttggtttttcgagacagggtttctctgtggctttggaggctgtcctggaactagctcttgtagaccaggctggtctcgaactcacagagatccgcctgtctctgcctcccgagcccagcagacttttttaaaaattaattttcatttatttattttgtgtgtaccaagcatatgtgtggacatgagaagacagtttgtcaactcgagggagctgtttctctccttttaccctgtggatcccaaggatcaaactcagattgtcagaactggcaaatggtagaataggcagtaacagctcctgccaagctatcaccccagcctgggtactagactttttatactctgctttaaaaaggaagtcatttgcagctatgtatagtggtgaacacctataatcccagtacctccagaggctgagagcttgggaccagccttatgtagtgagatcctgtcttagaaacaagtcacttgaattaaagccatctgtggtggtgaggtgaagaatgattcctgagtttggaaaaggtgatttttgttgtgcccccccccaaatggtattggggatggaactcgggacttcatgtgtgctaggcaagcaatgtaccgattagccgcaaccccaaccctttaactatggttttggttggagcttctgagtctggccagatgacttctgttgataatctagcgccctctccccgccatggggcagcccttgtttctggtggtataggcattggtgaagtcaacattttcttagagaatcatgtctccacagatatagacatgtccagaaggacaggcaacctccatctctctagacagacagatcagccattcccagcggctggaatataagagagggcaatgatgtgccttttaaagtacaggggttgaaattcagaaactgttttggatgtcagcttatctgcaggggggtcattcataagggggggaaatgagtgcaagccaattctgtagtaataaactcacatagtgcattactctatactgttgcaaatgtgtaaaatttacacttccttgacagaatctcccaacagaacttgaatgacgtatttactgctgcttgaagtgtaacttacaagaacattttgggggcgatttctaatttttttgtttcactgctgaggattaaacccagggcagtgcactatgccacactgacctgtttcccaggcccccagactttaaatctggtccagaaattacactgaagacaaacaaaaatctttcctattgaggtcttgtgcaagtatgcagagttgtagagaaagaaatgctagagtcagcactgtttgtactgggacgtactggaaggcgtccaagtacaagctcctggaggcaaatgcatagggtacacctacacggttctgtgtcccacggccctgggaaggatgcagtctgcacccacagagccaggagggctaagactgaatgttaagtgcagaaagtagaagtcagaacagaagtgagacatgccactcctgatgtacatcttttaacaaaggcaaagagagagagagagagagtttgtagaatgtctacagcaagtgtcggcccaggaagggctgttgggaagactccactttctcattcagaattctgtagtacttgtagttttcatgcaaaacagatgatgcttttggagtgggggtggtgatggtgaggaccactaaataaagcatgaagtcccagggatttgctcccccaaaaggatatagtgtgtattgtctgtatgattccaaccatatttttttaaatgcatggaatataactcactgaagacatgcatggacagtggctactggggtcttttctttatttgcgaagtggcttcattaattccaaattagcttctggactggaagggaaaaaaaaatgggctttgcagagattggaaagactcttggaagggagctctggctctctctctctctctctctctctctctctctctctctctctctctgtgtgtgtgtgtgtgtgtgtgtgtgtgtgtgtgaagtctcagctcctttccccgatgattcccagtgagggaccatgataggagggtggcctatatgtagctttgctaaggcctgggaagctggacttcttccagggatggccagggcactgagggaaactgatggtggcaaaggccatctgaaattgctgtcccttgactgccccttcctatttcagagctccttctggcctgtctcacccagatgatgtccagtcctctgcccattatcttcccctacagggacaatccacaggcctcctggaagggagtttgggccttgatgattctggagcaaagatttaagttcctttggggcaaagaatttcggttcttaggaagaaagcacaaacatagtgaagattgacagcaccatagactaaggatgttggtttggaaagggcagggaggattctgctttggtaacataggaagctgctaagacagtctgttttctgtagctgtaacaaaacgactgagcctggatggtttatagagactagctgctggatgggtgtcttggcacaaacctctaatcctagcacttgagaggcagaggcaggaggatctttgtgagtttgaggccagcttagtctacattgtgaattctagaacaacaaggattatactatgaaactgtcgtgtgttggttttgctcttttgactttttggctgtttgaggggcccactacctaactcccaaataaaccacacatggaggcttattcttagttataagtgcccagccgtggcttgtttctagcccttctaccttttccctctgggcttttatctttctttcttctacatatcttgctttttttcttactgtctggctgggctggcccctgtcctcccattctcattctcctgctcctccttctgtcttcgtttctccttctctgtgcctgccagccccgcctatccttgctcctgccacactattgaccatttagctctttattagactaccaggtattttagacaggcaaagaatcacagcttcacagagttaaacaaatgcagcataaacaaaagtaacacaccttaggataatatgctataacatgaaaacctgacccaaaaaggaaaaaggggggggggacaatgaattaattaaaaaatttcttttaaaatagaagcttatttggtttataagattagatcctgggaagcgcaaggaagtcctggcatcttcctggcatctggcgagagcctaatcctgctgaatcctaacatggcatcacatgatgtggtacagtgactgaattaaccctggtctcctctcatgcagccactggtgccgtcgtggggctggaagggggctctgtctccctggcctcctctactcctgttcggctcccaaggatcccatctctaaataccatccacatgggagttcagggattgagtttccaacacatgaggcttgagggaccatagcacgtaccacaaagccatttaatagcctttcttcctcttccttcccctcctcttcctctccttctcttcacccccctcatcattcttcttccttgttttgagccagatctgtgtagccctgtctcccctggcactttctatgtaacccaggctgacctcagagtcagaggctgggacttcaggtgtgcacctctatgcctagcttcttagccttctacatgatgacgaaggctattcaagcaggccttgccatagtgcttaggctggttcatttctgcccaatcacaggatgcatctatcatcagtgtgagagcgagcttagttctcctcctgtggggttggttcctggatgcaggagctgctgagtgaagttaggaatgaggttttgttgttggtccctcctccccccattatagtagggtgccttttacacacaagatttacagtggtgctacatcaggaaatcagtttcctggcaggcactcaataaaaatgcttaaacttgctgggcattagtcccagtatttgggaggcagaggaaggtggagctctgtgagttcaaggccagcctggtctacaaagcaagttccaggacagccagtactgttacacagagaaactgtctcgaaaaaaccccccaaaattattttttttaaaatgcttaaacttgggactggagagatggctcagaggttaagagcactgactactcttccagaggtcctgagttcaattcccagcaaccacatgtggcacacaactatccgttatgagatctgctgccctcttctagtgtgcagataaacatggaagcagaatgttgtatacataataagtaaataaaatattttttaaaaatgcttaaacttgtttaaatgggagaaaggagcattttctgggggccaaacctggggccttgtgtataccaggcaagcactcactgagctcaatataatattttttaatttttttgagatggggccttgctatatagctctggttctcctggaacttgttgaccgtgctggccccaaactcacagaagtctgattgctcagtactcatattttatttaaagaataaaaacaaagggaaaagaaaacctgtgtgtgtttgtgtgtgtgtgtgtgtgtgtgtgtgtgtgtgtgtgtacacgtgtatacatgtacacatgtgtatgcacataggcttcagagcctgaagaagctagaagaggtcaacagatctcttggagctggagttatgggcagctgtgatctgtgcaatgtggccgctgttcatcaaaaaaaactcaggtcctctgcaagaacattgcatgcccttaaccactgaaccatctctctggcaagtgaagaattgtgtaattaacatgtcagcgacttctatccataagccgagcccatgagaacacactgggtcccttcgggactgttcttgggaggacagaggatgggaatcctttcttttagatgctgtggtccttcccaggggacataactagggaagaggcggctggctgcccctggcctgggcctcacgctctctctgcctttctgcaggaagcctggaagcacgcgattgagaaggccaagcatatgcctgacccatgggccgagttccatctcgaggacatcgccacagagcatgctactcggcacaggtcagcagtttgtcccaggggctttgttttttgttttttgtttctcgaaacagggtttctctatattgcttgctttggggcctgtcctagaactctgtagactgaggccagctcgaattcacagagatccatctgcctgcctctgcctctcaaatgctgggattaaagcagtccttgtgggttaagggtggggcatcatgggtcctgcttctggttgaagaaaaagaactaataccccagcttcagattctacagcaggtgggactgtcagagaggcccaacaagctaagtctgtactaacattcaaaacgggaaacaatctgaaccgtggaaacgttttggtcccaggtgttttggttaaggaagggggagcggttcatgcacagcaaaggtgcattatcctccatctgaagttggctgagagttgagcagctccaagctcctcctgacttgtgacaccataatcccaacacttgcccttgcaaacaccagtagagcagacagtatcaaggcgcagtgtagcaggttttgatgcatggtcacttgcaggggcatcttaactagcacaccctgtcctctccatcatttctgctcctgtccttgaaggaggtggctgcagagcccctcttgtgcctcctctcctcagctgcatacctacctcccactgtgggggcaggatagttcagcatggtttggaacccagcatgtgaggtgtaagtaggtcctacctcttttctacctgcaagagcactaggatagcaagctggtgacatagtgtccaggatcaccagggtgagagtggctcttcactgagctggctctgtgtcttgaagcccaactgggatcttagaccagactgaactatttatttcctaaatggctgagtttatgctacccaggctgccagtgagaggatgccaagcatagctgtctagaacattctgattactggaggccatacatggatgtctgaaatgtctaaacctggtgcttctttctccggccgtagccttttaagatgaaaagccttggtacaagctggccccttctgtttaggacaggtttcctgcccccccccccccgaattctttggctggttgagagctagattctgctttaaacatgcctgagtttgaatctgatgctcagcaggagacctcacctctgagccagtttctgtaaaacaggcacaatgattatcgccgtctcagggtctccacaaacagtaaatgaaaaggtctgcttaagaacccagcatatagtgaactccatgaacttcaagcacactgggcatttagtcattcctttatttacttactgtgttactgaggattgagcccagggcttcctagatatagacaagtgttctgcctgtgagctacattcccagccttcatttcatttttattttgagatagggtcccctcaagttggccaaggctgactttgaacttactatatagcccagacagacctccaacttggctgttgaaagtagctggggttacaggtctatgtcaccagtcctggctgactcttgcctttttggtattagtggttgtgagcggcaagcacgaccctttcaaagttgcacactgaccccctcccccagcctctaggtgcctctcagaggcgaggcgaggcgagggagtggtgcatctatggcctccatctctacagagacgctatgtaaaacgtagtgctggcctgccgctggctgcaggcaaattgacagcctggcagagccctcctcctctgagcctgtggaggtaacctgccaggcttctgtttgttccacccgctgacaaacctgttttcccaggtctgggtgttctgaaccaggaggccactggccagagataaagtttggttcctgctgtagtgactcactgaggctgggaactccccaggcctgaggctgccagatgtgcgctgggaagagaattcctgggagagcgaagctggggatattctgcaaccacccctcccccttccacctcttctttctccattgtcctatcacttttcatctttccttccatttctctcttcatctccctctctcatgcaaagtctccccctctcttcctctccatctctctgcatctctctcaatctcttaaccagtcctcccccccatctctttcttatccacacccctatcattctcagtgtttcctccattctcctcagaggcagctctttccctgccccctacatgcactgtgacagtccttacctctgggagatgttatctacctgtgtgggctgtgcctggc

SEQ ID NO: 15 - DNA, 68175 bp, Cricetulus griseus
  >scaffold_9 dna:scaffold scaffold:CHOK1GS_HDv1:scaffold_9:43934890:44003064:1
  misc_feature 1644..1743: /note="n is unknown"
  misc_feature 22101..22200: /note="n is unknown"
  misc_feature 34911..35010: /note="n is unknown"
ttaccattcataatagtaccaaaattatagttatgaagtagcaaggagaatagctttattaaccctttattaaagggttgcaacattaggaagattgagaaccaatggaatagacccagctaaactgtccagtacctggcaggccatagatttcattcattggttgaacaagtattgaaagacagtttctttgaaaagccaatgctggtgccagatgctgacggatgaatgggtgtctagaagacccaggggaaggggcgggacttgttctcaattccgagttccacatccagctagatcccacgtgctcctaccaaggttctgactgccactgtgaacgcttgacgcagcggacgtggcgtcatctccctggttggcccaccaggaggagggaccggaagttatcttggggaggggggggtgctactggccggaagtggtcccgggtggtgctcgggggttctctggaactacaggggagtgctgggaaggcggggctcagggcggggcggggcccgcgggagggccgagggacgggcggaccctgtccctgccggtccccggcggaccccgcctgccccggcggcgcggccatgaagctgaagctgaagaacgtgtttcttgcctacttcctggtgtcgatcgccggcctcctctacgctctggtgcagcttggtgagcggggaggggcggggcgggatgcggggggccggccctaggcgcagggacggccggcctagccgacgcctgcctcccgctcggccctctggacactctccgtggtctgcgtctccgcggatgccagccgggcagcgaaaggcgccgccgccgctgtcgggcacccctcctctctctgccgctcagacccgcttgctgacagatttttgaaaatcctatcttcgttctcccctcaagctcttgacctgcagagcttaccccccaaaaaactatctatttctcatccttcaggttttaggccagatgtcaccgtagagaggacttctaaccatcttagctcaagtaacccttcttagtcccgatccctttttccctcgagactgtcctggcactcaccctgtagactaggctggccgaactcacacagatccgactgcctcagtgagttcgtgagcggttcagacttttctattccttcttagtctagaaggtaaaatcatgatcaagggtagaaagactgacagattatcagcccaatatacaagttaaaataatagcagggctggataattcagcaccagcaagtttgaggcgctgggttggaggctcagcaaagaaaacaaaagtgacagatggaattaacaatgcagagctgaaccaggcagtggtggcctatgcgtttaactccagcagtgagttccaggatagccaaggctacacagacaaaccttgtctcaaacaacaataacaaaaaaaaaagagttgagtatggtgacccaccatttggaaaacaggctaatgagttaatgtgtgaggtcaacttgggctatatagcaagaccttatcttttgttgtttcttttcaagacagggtttctctgtgaaacagttctggttgtcctggaactcactctgtagaccaggctggccttgaactcacagagaagtgctgggattaaaggatttnnnnnnnnnnnnnnnnnnnnnnnnnnnnnnnnnnnnnnnnnnnnnnnnnnnnnnnnnnnnnnnnnnnnnnnnnnnnnnnnnnnnnnnnnnnnnnnnnnnnaaaaaaaaaaaaaaaaaaaaaaaaaaaaaaaaaaaaaaaaaaaaaaaaaaaaaaaaaaaaaaaaaaaaaaaaaaaaaaaaaaaaaaaaaaaaaaaaaaggttaaaagaaaaggttaaaagggaagtcctgaattcactaggagttagaaagattttggctctgggttgttgaactacttactatcttgtggttgtctgccccaattcccattctctgttgatgcttcctgggaccaggccagccatgtgactgcctccctccgcttcgagctgcagctgagcagcttcgacagaaggacctgaggatttcccagttgcaagctgatctccgtcgaccaccccctgtcccagcccagccccctgagcccgaggctctgcccactatctatgtcattacccccacctatgccaggtatggctctggtacactcgaggtctgcatctaccaagatgtgttaattatgaatttggggaggcattgaactagggggtgatctttaaactagagcttgcaaaatgttatgatgaatggtctacctttactcagattggcgggaaaattacctttctagaaaaatggacaaagggataataggaagtggattaccttactgaatttttggtaaacttttttttttttttttttttttttttttttttttcttccctgaggcagggtttctgatgcagccctagctgtcctggaattagctctgtagacctggctgacctttaactcagagactagctggagtgctgggtttaaggtgtgagccactgctacccctctaccagatctgagttactgctaaactttaaaagaggacaataaagttggaaaggaaatttgagctgacaatgaattaactcctctttggaatttcttggttagaaagttctaacactttgattagctccaggtgtggtagttgacatcctagcattcactaggccctgacagtgatccccagcagggtgttgtagaaaggggcaggtaatttaccagcttttagaaatgttttgcctggcggtggtgtgtcacacgcctttaatctcagcacttgggaagcagaggtaggtggatctcttgagtttgaggccagcctggtctacagagtgagttccaggacagctagacagctagggctactcagagaaaccagcctaacaacatgaatccctgtattgaaaatcaggacaaactataaaattattcaaacccagatctatttgattccaaatcatgtgtcctatattcttaccctagcctgagtcctcaggttgaagagagtggtgacctggtctggaaaggcagggaaggtcagcatctgcacgaaattgacattcaagagggaggcaacttggcagtctcatgattcttttttgaatacctgaagccctgagttctgtcctaaataacatatgcacacatccaaagcttgggcactggtgaaggaaaatccagggagatgctaacagtggccaggagcagctattatcctaagtgctgtgggccaaggttgcctggtcccttccttcctgcatctctccccctgcaggctggtacagaaggcagagctggttcggctgtcccagaccctgagcctggtgccccgtctacactggctgctggtggaggacgctgagagccctaccccgctggtctcggggctgctggctgcctctggtctcctcttcacacacctggctgtcctaacccccaaggctcagcggcttagggaaggcgagccaggatgggttcggccccgaggagtagaacagcgcaacaaggccctggactggctccgaggcaaagggggtgctgttggcggggagaaagacccaccaccaccagggacccagggagtggtgtattttgctgatgatgacaacacctacagccgggagctctttaaggaggtgagccctggatgaagatggggaaagagaccaggtagcagcagcttccttctttatcttgctcaccagtattggggtagggtactgggtgaaggtggggagcagtggggagaggcgtcagagaacaaagtggttctttcccttgggccaccactcttgtttcttttctcatctccattagatgcgttggactcgtggtgtctcagtgtggcctgtggggctggtgggcggcctgcgatttgagggtcctcgggtacaggatggccgggttgtgggtttccacacagcatgggaacccaacaggccctttcccctggacatggcgggatttgctgttgccctgcccttgctgttggctaagcccaatgcccagtttgatgcaactgcaccccggggccacttggagagtagtctcctgagccatcttgtggatcccaaggacctagagccacgggctgccaactgtactcaggtaagaggatggagaaaccagctctgggatgagccgttaataggaggagtgagaatgggtgtttgaaccaggagaatcgccccagatctctggtcagctttgatttttttctgttgaaaagactactgagagtcaggacggacagggctcctgccacttcatcttacagacttctgtgaagccctgtgtgtatcagagggtcaaggaacagagccccatttgagaggcagtgaagttcccccaccccatacttcacacatgatataccaactctgaatatagaagggggctggtggcatccattctagatcacataccccagggacctgggcatggctggctctgaccctaacccttccttcacaggtactagtgtggcacacacggacagagaaacctaagatgaagcaggaggagcagctgcagcggcagggccagggctcagacccagccattgaggtgtgatggcagcctcaccctgacttctaccttattttaggcacataccttgtgggactgggctccaggccagtccaggatgtggttttttaaaaagacctgacccctcagaaccagaggcagcccctccaaccacagggtgtggcccagctgcttccctcccttcccccagcctgccatgtggcactgcccacaggctggggacaagcagttgttgtattgagccaggtcagccccatctggggtggagcaggacagatggactcaggagggagggtggctgagggaactgggtaacttattggggacaagcatgcactggggggctagaggagctgggctggaccctccccacctgagcatgcggatcctcttcctacctctagaataaagaatctcaacctggagggcttcgtgtttcccttcacttggcaaacctccttgctggtctctacacccaagagatataggcaacctgttcctacacaggctggttcctcctctgcacagacatcagtccttcaggccccatcccctagacaagagagagcagtggcttccatccaaaaactttatttgagaatctgtacactagaaagagtctccagtcctttgggtgtcactttccggccaccctgatctattctcaatcttggtgggtttggctgcagaggctgggctccaggatacctggactcctcctcgttctagtctatctctgactgctctaactcctgtaacctctcctcccccgagcctgagtaaagttttccatatttgtccacttcccccgccccccacactttaggttactaggcctcaggtagaacctccttgggaggttcctcttctggtagggcctcttcaggtgctggcttgtgggcagtccctccctgtagccatgcagttttcagtatatctcgcagcccaccaggaaaaagatagccctgggtctctccttccccatcaatgactcctccaagcccctccagcgctgtctgcaagtaccgcaaaccaaggagcactagagcctgtggggaagcagatagaaagagtgatggttagtgcatttgtgaccacagggctggaagtggaaggaggtggggcccttggctgactgacctgcagcaagaaggtgacagccagcatgcttcccagtgtgcccgacaaaccctgcaggtgccccagcagcacctcatggcacccttgggcccagaggtttaggttgggctgtcgaggatcgaagagcagatgggcatagggatctgagagtcggctttgcaggcaaggccggggtgagtgagggttgcaacaggagaaggggactccatcaattaggtataacccttccacattgctctggatccggctgcaagggtagagtaatattgttagatggctgcagacagaggcctaaaggggcagctgagggcagggacagttgaaaaaaatactgtaaaacatcatgctgagtgctttactatccaagcatgcttaattaatttatctccacaactttgtaagataggagcctatctgggagataaagacaggtatagctatctccgttttacaggtgaagaatgggcctagagtggtttggcgacatgccctggacggcacagctgataaatagaagagtaatcgattctctcaaccatatgctctattgcatgtctgggtgagaatttcaagataaggggagtctagggaggagaaggaaaagagaaacaaatcgatcactcactcaaccacatcttggtcactggggtccaggtaacggttgctgacccattggacaccaaaccaatccttgtagccatgacgtccgcaacagtggtaccttaactgcaactcatccatcagtcgtttggcctgacagtagccaggcacctctgtgtccttgtagtgaaccaaggcagcctccagaccttcctccagtccctggtgcagacttacaggcaaaatcagggttagccccaaggcaagggccagcaacccaccgcctgcagctgtgccagctgccagcagtggactcaggacccctcgccaaggagggtatcgagctgcatccagactcgcccggctggctcctgcgccccctagtcctgtgcctagagccaccgctcctgctgccagggcagtctggggcagggcagggaatggacaagagggagccaggaaggtgccaaggttccacagctgtgccaggaggtgcccgctacagaggagggtgaggccaccggccagtgccagcagccaggagaggagccagagcccctgcgccagacggatacggggttggaggggcagcaccacgggcagcaccggcgccatctcccatctctgcccaaggaagtgaagagccgtcggggttgggggttggctggggcatgcagaatgctgaatcagcccagcctggcttcagtaggactaatgccatcctgaccccaataccctgggcatcctcccactccagccttaataaccctctgctagccccaattcaggatgccttagtcttgccctttagtagagtccccgcccccaggcagaaggcccatttcgtgaccccgccctggcctttcgcggaagtgagagtttgttcgcccggctccgggtttagagacccagtcctcaggctctgcgttccctcccaagtcctctgggagcctcgggcccggaagcccggctagagcccagcggggtgaggggtcagccgggtgtccccgcccccgaccagagcctggggggggaccggacagggaagggttacctggcggcccgcccccgctccggcccgcccccctcccgcgcttgctggcgactccgggtcccgcgcctgtttgtgctgcggcgctggggctcgggtcggccctgtcaccgcatcccggggagcttaccccgggagagtagcaggcccaggttccacaacaccccctccaacccttgcctccgcgcccgacagcgccccccgggggtggcacggcatccctccgcgcgcgcgccgggggtgcttccttcccctctccccagccatggcccccgcggcttagacgcctccgccgccgctgctcggaggaacgcgggggccggatggacggggctgcagggcccggtgagtatggggcggggcgggcggcgtggcccggattccgggagcgccagcctgacgggcgctgccagtgctggacggctgtccggtggcgtgcccgcgtgctcttgcactccaggggctctgagcatcctcctcagttcctaagaacctccaactgtcacttaggacttccttaatgccattctactccttggttctcttgagtttccctgaccgctgtgtcactctgggcctcttctccgagaattccggctcttcgtatttgtgactcccacagttacattgggatgtacactaactgctctccgctggtactctttaccgtcaccagatcttgttccttacaccgtggcccctcaggctgactttactgccgccctgtccactttctagcttgactgcttttgcatttggtagagacttgggcttgctggtgggatgtgagggctgtagttcctcactagttttgcctttgcagctctctccctgtctggctcccacgtacctcggcagtattccataccgccattctccccccctccgcccgcacccccccccaccacttcatggtactccctgtctatgcggaggctggggtagcagcaggaatgccaggctcactgcatgccctgctacgaggaggctcttgatcttctagcctctgtctttccccctctggataagcctccgaagctttggactgtttgaaagaggtcgtcctgttggacaattgggttgtaaagttggacaggaggacagaacccccttaatcttccacgtagtggcacttttctgagtgtctgttgctccttctctaggtgagggccctgctcatgagacactgcagaccttgagccagaggcttcgggtgcaggaagaagagatggagctggtaaaggcagccctggcagaagcgcttcgcttgctgcggctgcatggcccctccacctccctgcagagctctggcacaccagctccaacaagggacaggtatgcatgtcagcacactcattcttccttcctgggaactttgaggcatcaacttgatttgctgtctccctagcagcattacagctcccccgggcctgccacctacatgcagcccttccttggtgagccgaggcacccagacggaggaaaaattggagatggagtcatcctctggaccacctggcctgagcaatgggcctccagctcttccaggagccagtgaagagcctagtgggacccagtctgaaggagggtgcagcagcagcagtggggcaggctcccctggccccccaggggtccttaggcctgtgcagccccttcagcgttctgacacgtatgtgtgtcccgtgatggaagctgagggggtgggaaggctaggaagcaggactgttaagcttgatttcactttttcattctgccccaccaggccacgaagaaattcctcctcctcttcatccccctcagagcggcccaggcagaaactctctaggaaggcggcttcctccgccaacctgctattgcggtcagggagcacagagaggtgggtaagccttctcctcctgcctcagtttgctgtaccccagcccagtttcttgactttctccattcctgggtggggtgggtgacctcatgagccagcaggaagaaagaaacaaagcattccttgggattcctgcagtgttctgggcactgtgctaaaactctcctccatgtcatttaggccctgtagcatctttggtgagtaggttgtctcttgtgttctccactgaccaggtgaaacaggcccagagagggcaatcagttgcctgaggtcacacagtcaagctctgaacccggtttttcctgattctagttctgctaaccttttcatatcacaaaatccctttcaaaattctaggagctcaaagcttccatgacattttttgttgttgtttgttgttgttgttttttggtttttttgcttttgtttttttttcaagtcagggtttctctgtattactttggaggttgtcctggaacttgctctgtagaccaggctggcctcgaactcagagagatcctcctgcctctgcctcctgagtgctgggtttaaaggcatgtgccaccaacgtctggcttatttagttgaaacaggttcttacattatagcctgggttggcctaaaattcattttgttgcccagactggcttaaaaggcatgatagttctcctttcgtggcctctggagtgctgggaagagagagacctggtagctctggtggtttttcacagatggctgttctcagagcgtcatctgatacccctctccctacaaagatctgttctgcccacttctgtactacaagggaacattccagagccaagaagtgttgtcttagtggacctgaaggtccactctagctttgtcctttcttggcttctcctttattctctgaagacccattgtcagcttaccatctagtgacagtgacctttggaattcacttgtcgctttccttttgggagatttttgcctacctcctagattcttgaaaggcagggctggtgtacactctggtttcatttttgaccccgctttacagatacgggaatataaaggtcagtagaggcctagaaaaaagggcacaggctgcttgtttcatggtcctgttctctcatctttatattgccttctcgttcttcttcccctttctcctccccgtctctttgcttcttttttagcctccatcccacttctttccctccttcctctctttctttctttggaactaaaagtccccatctctctagagccctgttactctgacagcgaccccacaccagcaggctgactggcgtgaacctcctgtcagtatcttgccccacccatctcaggtattgggacttgatcctagtctttacgcttttacctcttcccaatagccgtgggagcaaagaccccctctccagccccgggggtcctggatctcggaggagcaattataatttgggtatgtacagagaggcagagggaggaacttggatgatggaattaaggtttgggctatagccctaggagctgctttggggatgtgtcaggtatggcgggtatgctgcgttgaccttctggaagggaggctcacttctctgcttgtctctgtagaaggcatttcagtgaagatgttccttcgtggccgccccatcactatgtacattccatctggcatccgaagtcttgaggagctgcccagtggcccacccccggagaccctcagccttgactgggtgtatcctatcccttccagttccatgggaactaccccttcccactatggatcccccttctttctttagtttctttctgtgtctgtggggacgggaagtcctctgaaccatcccgccctgtcgtggatggtaatgccaagaaggagctttgccattttgacgcttcactctttttcctcctgcctttggtctggccctttccttgaccgtggtccccaacacagttatgggtacaggggccgtgactctcgctctaatctgtttgtgctgcgctctggggaggtggtctactttattgcctgtgtagtggtgctgtaccggcctgggggcggcccagggggtcctggaggtggcggccagagacattaccggggtcacacagactgcgttcgatggtgagggtcttggggtttggggctggtgggctttgcagggagagggtctggctgggggtggaagggcagaaaagacagttgccttgctgcttcttaagcaaggacaaggtgccttgggtggtcttgagagaccccctttcctagagttctcctccctctacttagccttgctgttcaccctgatggtgttcgtgtagcctcaggacagacagctggagtagacaaggatgggaaggtaaggccaagtcagaatatcaggcagccaggatggacttaaagaccagcttttcttcatagttctgatctcttcttttccactagcccttacagcctgtggttcacatctgggactcagagacactcctaaagctgcaggagattggactgggtgcctttgagcgtggtgtgggggccttggctttttcagcagtggtgagctgggcacaaagcttctagacccctatttgtttgtttttttgaggcagggtttctgtgccttaggttgacttctaactcaatatgtggggtgagggtgtctatgtggggagagggtgtctttgaactcttgatccttctgcctctagcctctacccaccaagagatataggcataagccattatgtcttgctagatccttcttcttgcttaggacactctttgattttaccaggaagcctggggaaagttctggtgccctaggctcaccagagtactccagaaattctcctgagaaagagatacctgtcgacttcttttgccctcccagcctgtgataggacctctgtctaatgttgggaatgtccagacctcccaagctcatggtgttgtgtccccatcctcaggaccagggtgcttttctttgtgtggtggatgattccaatgagcacatgctgtcagtgtgggattgcagccggggagtgaagcttgctgagatcaaggtgagaagcctaggtggtttccaaatctggggtagggtgggaacggtggaatacagacagttccaagcttgcttacacatacacttcctttccgactagggcaaaaagctcgaaacactccgttctctaagcttttgtttgtttgtttgttttttgtttttcaagacagggtttctctgtggctttagaggctgtcctggaactagctcttgtagaacaggctggtctcgaactcacagagatcagcctacctctgcctctctagtgctgggattaaaggtgtgtgccaccactgcccggcagcttttgtttgtttgtttgtttgtttctttttttttttttaaagattttatttattatgcatacaacattctgcttccatgtatatctgcacaccagaagagggcactagatctcataacagatggttgtgagccaccatgtggttgctgggaattgaactcaggacctctggaagagcagccagtgctcttaacctctgagccatctctccaacccagaaattttactgttttttttttttttttttttggtttttcgagacagggtttctctgtgtagctttggagcctatcctggcactcgctctggagaccaggctggctttgaactcacaagagatccacctgcctctgcctcccgagtgctgggatcaaaggtgtgcaccactaatgcccagcttttgtttcttaatctatgaattaggaactatagaagttctagtagggaatataagttttaggggatcagttctttttttctttgcagtattgagggtcaaacctgggccttgagtattcgaggcaagcattctaccactgctctacagctccagccttctaccagagccttgaaggaagaattatcctggggccatagggcttttgtagaccagctgtcaggatgcagattgagttaaagagtagactttgggggctggagagatggctcagagcttaagagcactgactgctcttccagaggtcctgagttcaattcccagcaaccacatggtggctcacaaccatcccttatgagatctggtgccctcttctggtgtgcagatatacatggaagcagaatgttgtatacataataaataaataaaatcttaaaaagagtagactttggtggtggcacaagcctgtgatatcagccactctgaagacagcagagggaagaaggctggggatagagcccaatagtagagtgtttacctagcatacacaaggccctaagttaaatcaatctcactactgcaatacaaataaattaaagagtcaagagctagatgtagtggttcatgcctgtaatttcagcacttgaaaactgaagtaggatcaccgagaattctaggccaggctggcctatagtgtaagaagttggtcaacaaacagcaaatcaaaaaaaaaaaaaaaaaaaaaaaaaaaaaaaaaaaaaaaaaaaaaaaaaaaaaaaaagctgttcaaagttcatcctcagttgctccaggacaagcagaggtacatgagactctgtcacaagaaacaaaaaacaaacaaaaatgctgggcaggcgtggtgatacacacacaccctttttttaaaaaatttaaattagacaagcttgcttcacatatcaatcccagttccctctccctctccccccccccacctccttaatccccccaaccccctaccctatcccccctcagcttcccagggagggtgaggccctccatggcggatctccaaagtctgtcatatcatcccagggcagggcctaggccttcccccatgtgtccaggctgagagagcacccctccatatggaatgggctcccaagtccattggtacgccatggataaatactgacttactaccggaggtcccacagattgccgaggcctcctcactgacacccacattcagggggtctggatcagttccatgctggcctcttagctatcattctggggtccataagctcaccttattcaggccagctgtttctgtgggtttcaccagcccggtcttgacacctttgctcatcactcctcactctgtacaactgggttccaggagttcagttcagtgtttagctatgggtatctgcctctgcttccatcagccactggatgaaggctctagggtggcatataaagtagtcatcaatctcattattggggaagggcatttaggttaacctctccactattgcttagattgccagttggtgtcatccttgtagatctctggaaatctccctagtgccagatctctcctcaacctataatggcttcctctattatggaatctctcatcctgctctcttctattcttacccgactcaatcttcctgctcccccatgccctcttctcccctcctcttctccccctggtggtacacacctttaactccaaaacttgggaggcagaggtaggcaggtttctgagtttgaggccagcctgatctacaaagtgagttccaagatggccagggctacactgagaaaaacaaaaacaaacaaacaaacaaacaatgcatcaaaacagtgagggtgctcagggcttagggtggctgaatcaagtgtcttcctttcttcagagtacaaatgactcagtcctggctgttggcttcagccctcgtgacagcagctgtattgtcaccagtggaaaatctcatgttcacttttggaactggagtggtggagcaggggttcctgggaatgggaccctcacccggaaacagggtgtttttggggtgaggtgtggatgggtgaggtgttggggagggaggtgggactgagtactgtagactcttaatgtgccccagcacccccagctgccctgtgacatctgggctttgacttccactttgacctctgatctctgtcccctccagaaatacaagaaacccaagtttattccttgctttgtgttcctccctgatggggacattctcacgggagactccgaggggaacattctcacttgggggcggagtgtctctgattccaagaccccaggcaggggtgggaccaaaggtatgtggttggggataacatctaggatgtttgtatatcagaaatactgtggaaacagagcagagagtttccaacatttttatcttgagaactgataaaccctctgggtggctagtctagaatggtggggagccatatggtaaaggagagaaggctagggacttgggtttgtcagatctcaggttccaggttcagttttgccactattactatgagctgaattggcaattgctaagcttagagtgtcttctgtaggtgctcagtagctgggagttatcttgtgttgtgatggtctaagctgccccttttccctacttccgcaaactctaagagcatcacttacctagggctttaccaacagagacctacacaatcgtggcccaggcccatgctcatgaagggtccatctttgccctgtgtctccgacgggatgggaccgtgcttagtggtggtgggagggaccgacggctggtacagtgggggcctgggttggtggccctccaggaggctgaggtgagagatgggctggggtcaaggaagggagggggagagggaatggtcagtgggcttttgacattctgttattactctgtagattccagaacactttggggctgtgagggccattgctgaagggcttggctccgagcttctggtgggaaccacgaagaatgcattactgagaggagatctggctcagggcttctctccagttattcaggttggggagccaaaagccatgggaagaaatagggaagggagttggaagagcagtggtgacaaacgatgatctgctgcagggccacactgatgagctgtggggactgtgtacacatccctcccagaaccgcttcctcacctgtggccatgaccggcagctctgcctgtgggatggggaaggccacgcactggcctggagtatggacttaaaggtagagtcagctgcctttggtccaccatgtaacacctgctcttactccctaacattgcccctccagttgtgttatagtcataggctattcaaatatgaattctgtacagactggcaaaagtgatgccttgtgctacctgggcattgccgttgcctcaggcctcatcttggttcatcagctgtagcacagttaagtggtttcagtatatttcccgtactagggtctgagagacctgtctatcccaggtttccatgcccccttgtctctggttgccttgggagaatcctttgaagttactaagatgacaaggtgcccatctaacttcccttacttgaaagtcatcttcttttattaaacttagcatttatatacatacttagtgtgacccaggctcttttctcccccaactcccaggcccccaacctctgtatcctcatgtctctagtatttccccttatgctttcatgtgtgtcctactgttctctccacccctgtcccttgaagcctctccctttgtctcataggccccttagaaaggtattttccttctcttttcccaggagacgggtctgtgtgctgacttccatccaagtggggcagttgtggttgtaggactgaacacagggaggtgagagaacaccaggtctcctatgaagaaaagcagggagttctgggaagggttcctggtaacaagggaagggacaagaggtgaccaaggctaacttaagggttgaaccacacctttttgtgtttgggtgcttttctgcaacccaggcctcccttctcctgctgtcaccaagccttccgcagctatattcttgagtctgggagcagaatggggtgtcaggccaggatggggaagcagtgggatggggaggggtgcgtgtgggtgggcaaacagggaagtggcaggcttactgactccacagagtttgtgaggtagacctggtctgtagtttctgacttcttttccaggaggcatcagaagccttccctcagcttctgtttgccctcagcctcttcccattcctcagcctaagagtccaatggtgacctctgccctgcccagggtctccctgggggtgggtgggctcacatcctgccctcttcacttccctcccttctcccttttcaggtggttggttttggacacagaaaccagagagattgtgtctgatgtcactgatggcaatgaacagctctcagttgtccggtacagcccaggtgggagccacccccaccctggacttggatcctgctctggctcttctgtgtctgaataactctctttgtagatgggttgtacctggctattggttcccatgacaacatgatctacatctatagcgtctccagttgtggtactaagtctagccgctttggcagatgtatggtaaggatgctaggttggaaggtggggtttgttaattgtacagagtcataggggtctgatggattaattaaggtctagtctggggatgggaaatggtagctatcttgtccaattcttgactcttgttccccagggacactccagttttatcactcaccttgactggtccaaggatgggaatttcatcatgtccaattctggggactatgagattctttactgtgagtggcagggtgatggggataattgcagtgtgtgtttttgttttggtttgtttgtttttgttttgcatcaggctggtctggttttttttttttttttttttttttttggtttttcgaggtagggcttctctgtggctttggagccttgtcctggaactagcttttgtagaccagcctggtctcgaactcaaagatccgcctgcctctgcctcccgagcgctgggattaaaggcgtgtgccaccaacacctggcttggcctggaattctctatgtggcccacgctgccttcacctttgtcatcttcttagttatgtctcctaagtgattatagatggggtgctgataggaggcttccagtcaggaggggtgacggtattgaaggtgcatcaagcagagggactgatatggaggtggaaaggagctggaattgtgcacaggagggatcctgtgactaggtaaaatacagttcacaccatgtcttctttccacaacaattccaggaagttgaaaaatgttccaggtatggtagtgtacgcctttaatccctgaatttgggaggcagagacaggcagatggatctctatgagttcaaggccagcctgtctacgtagtgagttccaggcaagtcaaggcgacttagcaagaccctgtctcaaaaaaacaaaacaaaaaacccagcaatgggggcacatacctttaatcccaacacttagcaggcagatatctgagcttaaggccagcctggtcaacactgtaaattacaggacagccagggctacaaagagaaaccctgacttgaaaaaccaaaaaacaaccccctcaaaaaaaaaaaaaaaaaaaaaaaagccatgcagtaagaaaaggttgtcttagtataatttctcagggcaagtgtggaggggctaacttatttaggaaggaaaaactgattggaaactgttagaactttatccagaggttgaggcaggagggtggggagttccaggcatgactaggctaggctctttctcttcaagaaagggtttcctcaattttgccctggctttcctagaacttgctttgtagaccaggggggacccaaactcagaaatctgtctgcctctggcctttaattccagtgctgggattaaaggcatacaccatcatgctgggtgtgcttagactatctttctttctttcttttttttttttttttgagactgggtttctttgtcttggcccttggctatcctagaactaggtttgtagaccaggctggccttgaactcacagagcctctatctccagagtgctgggactaaaggtgtgtaacaaccatcctggctggacttagattgtcttaaagtcaaacgaaatcaaactacagtgagaactcagaaatcacatagtgaggttcataatggatcaggtcaccttcccagctgagctggttggggcaatttctacctaggggacgtggctggaggctgcaagcttctaaggaatcgctatgagagcagagaccgggagtgggctacctacacctgtgtgctaggcttccacgtgtatggtaagtagtgaagccagcatgcagccgagccctttagcagggctgggaaaagaaggtggaacccattcttggatcagaatgttgggtgtgtgtcatgtgtcatggcggggggggggggggagaggcaaatccaggccaacaggtccctttgggaatggagaggattgtctggaggtagcctggaaatcctaagcactgcagctctaggttgtggaaagtgccctggctgaggctacctgttgtgttaggtgtgtggcctgatggctctgatgggacagacatcaactccctttgccgctcccacaatgaacgtgtggtggctgtagcagacgacttctgcaaagtacaccttttccagtatccgtgcgctcgagccaaggtgagtctttagaggaccgttgggccccagtgggtagtcttgggaccctatcactgctgtgactgtacatttttttctggtgcaggcgccaagccgtatgtactcaggccacggcagtcacgtgactagcgtccggttcacgcatgacgactcatacctcgtctccctaggtggcaaggacgccagtatctttcagtggcgagtgttgggcgctgggggctctgggccctctcctgtcacgccttctagaactccctctctgtcccctgcctcctccctggacgtgtgatgaatgctggatggttttgtccctctggtactgtggccttgccccgccctggccaaaacccctaggaccaagtgcagcccttttcctgggctggctttttctttgatttcagtacattcccagttgcgcattttcctggaggggcgaaccgccccattgcacacacgataacgactcgctggctgaaccaggcaaccccagctctgactccctttgcctggtgaggggcaataaaaagaaagaaagtcaccgcttggtgcttttgtggagtgcggcggttgcctcaggggcccggtagggttgggatgaaagaaaaaagtgcagggcgggaagggaaaaaaggagctcggaccaaatatgcaaataacaggcaaagcggcttgcaaataacctcaagaagcgcgagggtgcgcgcgcgccttgcgaggccactgtcggagctgcagggacacatagagtaaagagttaaatgcggctccctgccgccctcgggggcggggtcgagctgcaacggaaataaccgagcgcggggccgcggctgagcgaaaagagccgagttccttccggaagtggccgatctgcggggtcttgctctccgacctgagccgagcgctgggccttgttctccggatcggccgaaggtgttccggaaggaggcgaacccggacgcgggcagggcaaaccttctcaggggctggcaccatacggcgtctgctgggactcggtgaagacgctaggagccggaatctgtctccggtcaggcaggaaccgagctcgttccggaagaagccgagcagaccggcgccggcctgggtatcccgggcgtgaggctatagcagtgtcgtcgtggtcttcgtgcgagcagtgatgaaccgcgacggctgagcgagcagaggtgccggctgcgcgggccccatcgacacttccgcgaagcgtcagccccacgctgggggcatcgtctggagctaagctttacccccgcgagcctccgggtcctctttgtgcggccggaggccgcggcgggaacggccatggcggctaacatgtaccgtgtgggaggtgagtacaccgggcggaagaggttggggacgggaccagggagactcggtgtccgcaggcgcggggagcaacatctggggtcgtaggggccacagcgccgaccggaaccggaaccgagacctatggttccgcggcggcgacgctactgggagccgagtctcccgcagaggcttacctacaacgatcggtgctcttgagtctgcgactggatcccggggtgggaagtaggcttggtttggaaggggactgagtgactgcggggccagctgcggggagccagtcgctcaggggttttcttttctttggcggcttgttcgttcacgaaggtgaggcctgaggtggggggaacaatttactcaattctcccacgcaggggtgcaactccaatgcagagttgtgtggactacagggaaatccttgttatctttttccccctcctctctcacttcttggtttttcgactctgtctgtctgtctctttggtttttcgagacagggattctctgtagctctggcagtcctggaacgcactctgtagaccaggctggcttcgaactcagagatcctcttgagtgctaggatctgacttttgagtgagaatctgattttagcgctaagtgttgcaagggtgggagtaaaaacttttctccctccccccccgcccccccccccggctgtcttagaactcaggaaatagaccaggttggcatcggactcagatccacctgcctctgcctccctctgctgggattaaaggtgtgagcaatcactgtctggataattcttttatttcttttctcgttcttttttttttttttttcctcgagacggttgatacttattttcttttgttttctcgagacaggctttctctgtctatccttggctgtcctggaaattgctctatagaccaggctgtcctcgaactnnnnnnnnnnnnnnnnnnnnnnnnnnnnnnnnnnnnnnnnnnnnnnnnnnnnnnnnnnnnnnnnnnnnnnnnnnnnnnnnnnnnnnnnnnnnnnnnnnnntttttttttttttttttttttttttggtttttcgagacaggtttttctctgtgtagctttggagcctatcctggaactcgcttttgtagaccaggctggtctcgaactcacagagatccacctgcttctgctgggattaaaggcgtgcatcaccaacacccagctatacttcttttcttaagtctttcctcttgcacatctccacatctctacctagcattttgtctttttttggtccacccaaatccactttctcttctgggtgctctggttttcttctgatcttgtttctccccacccccttctacagattacgtctattttgagaactcctctagcaatccttacctggttagacggattgaggagctaaacaaggtgagtggagcagaaatggagcagtttctttcttctggagtctaactccaagtggaagggagagccagccttacctaggcttagagcctatacaggtgagcgagcgttcattccatgtatagagctgctgagagcttagctgaagctttatcattctcacatctggggataaaagaatcctgtctctgttgttttttttttgtttttttaaatatacagtgtctattttgcagccttggttgcctggaactttctgtgtgatcaggttagcaaacttatggagacccatctcattggtcctgtaattatctttgaatattaagtcttcattgctgagtttttggcctcttctacttaagtccttagagagtgcctgttagtgtacctccactttcaaatggctaattttcattgccctgtttttcttccttctttagactgccaatggcaatgtggaagcaaaggttgtctgtctcttcaggagaagggatatttctagtagcctcaacagcctggctgacagtaatgctagtgagtgtcttcattccttcccctttcccccctccccaggatctgaggactagacttgttcctgcaggtgtttcccctggtaacacgcccaaggcagggtatgagtttggaggtgggaagtgcctggtctgcagagcaaggcctgttgttacatgttggggctggggctggaagccgggtggggagaccatgatcagaaaagccagaatgtggtgtgtgtgtgtgtgtgtgtgtgtgtgtgtgtgtgtgtgtgtgtgtgtgtgtgtgtgtaaggagagatacttagatagggaatgaaaagagctttagagaaggcacgtggggacattttgggtactttgggacagtggttagtgagcgatggtcaaggtggagaggaagatactgttttgagaatcctgcatagtaatgggggaggcttatcctgtcgtctggaggtgaagccaaaacattgacgaagctgacggaagctagagggcaggaaagcgcttgagctttcctgtttccctctctattccagttatcatctgccttacttcatcttctcatttttcccatttaactactttgcctctttttttttttttcctaaagttttcttttttcaggccacagccatgaaagagttaatgagctgggcctaccaagtttcctggccctttggggtttctagccccatctggcaggggctgaccttggctttgtccaatcagaatgggtagggggtgtggtcctccttgccctcccctgggttttctagagcacaccagggagaggtggagcctactacacagacacaggacctcccccacctccccacttgctgtggtacacccagttcttcaggggaacaatgcaccaatgaacaagtgcttaagtttctatcccgcccactttgtttggcacttagccaggttaactgtttccaccaagatttcagtgcaagctgctgcctcttgaggaaggtgttggctctggtttgagaggtgcttttcttgaaagccccacagactattattaaccaagtagaaagagaaggagaagtcagttgcatgtgatattcaggtacagcaaagagtcctgaagcatgaagaggagctgataaataaatcctgtgtgctgttcttacatcttagctggattctaggacgtcaggctggttcagcaagaaagagctaaatgtaacatacagtattgtggctatatttgtgtgttagagcggcatcagcattggcaactaggtttggggcgcatttctatggcatccttatgcaggtctccccttcatggaattaaagagaggactgagcatccacagtgaggcgtgaggccaaaagggaaagctgggcgagtgagggtgagatgcccgagggaactgagacagcagctgaggtagggtgttctttagctgagctagttagccacctcggagtaccttgtttctgacttgttccttcctctaggggagtttgaggaggaatcaaagcagccgggggtctcagagcagcagagacatcaactgaaacaccgagagctctttctttctcggcagtttgaatcattacctgccacccacataaggtataggagggtctgggtccctgtggcctttgtatgtgcccttgtttagaaatggagagaagcgggtgttgtgttggggatggtagaaggtatgtcttgctcattcagtactttctggcctgtcttagggggaagtgcagtgtaactcttttgaatgagacagatatcttgaaccagtatctggaaaaggaggtaaggacatcctgagagaagagggctgggcttcactgccatgtgggctcctgtccacaacttctctctctccatttttaggactgctttttttactcactggtgtttgacccggtgcagaagacacttctagctgatcaaggggagatcagagttggttgcaaattccaagctgagattccagatcgcttgacagaaggtaagcaacagagtagatgtgctggaacgtaaatttctgtggatctcgtgacttggggtttctgtacaatcttagattttctgttgtgaccttgccagaatgggacttaggagcctgaaagagaggaatgggcacagctgggaggggaattcggaggcttgatgtggctgatggaagaagcaggtggatctgagtttgtggccagcctggtctacagtaagttccagaatagccaaggctacacagagaaaccatgtcttggggaaaaaaccaacaacaaaggaaaaaaaaaaaaagaatccaagcagagaagaggaagaagttattgtgagtgactaagattatcagttatttccccctctctccctcactggtgatgctgtctgcttggttcctcaggtgaatcagataatcgaaaccaacagaagatggagatgaaagtctgggacccagacaaccctctcacagaccggcagattgaccagtttctagtggtggcccggtgagggtgggtggatcccgaagatgggctggggaggagtgagccctgttctgaggcccatctgtttttttttttctctttagttcctgaggctgcttgaacttttttcttcccttcttgacttgtcaatctctccttagagctgtgggaacctttgcaagagccctagactgcagcagctccattcggcagccgagcttgcacatgagtgcagctgctgcatcccgggatatcaccctggtaagcacaagttgttgggcatatcggggcaggagaggagggagtcatggagacagtaggtatactcaaagagcagcaagtcatcagttttcttttctatttggtagttccatgccatggacacattgcaaaagaatggctatgacttggccaaggccatgtcaaccctggtgccacaggggggcccagtgctgtgtcgagatgagatggaggagtggtccgcttctgaagccatgctatttgaagaggctctagagaagtacgggaaggatttcaatgatatccgccaggactttgtaagtgaataggactagaagcggtgagaacagggagtcaggacctagggccagatgccatctcaacctctgtttgctgttcttagctaccctggaagtcacttgcaagcatagtccagttttattacatgtggaaaaccacagatcggtatattcagcaggtatggtttagggccgggaggttggacagaggccccctactaacctctctgccttttggtttgtttgatttcatctgtactgagatggtctgaatttctgtttttttccttctaacagaaaagattgaaagctgctgaagcagacagcaaactgaaacaggtctacatccccacctagtaagtgtggcaggaagggagagtgtttctcttcctctcctagtttgtttctttcttagtgattggggatgagcaggaggcagaagcaaattgtagaagctgtagttcagtgataagcatgggcttactgtcggcaaggtcctagtttaattcccagcattccagagagagtgatggggtagggtgcggtggggtggtaggaaagggagggacagatagaagtgagttatttctttgactagcttctatgttctcttgtttccttcattagtactaagccaaaccctaaccagatcatttctgtgggttcaaaacctggcatgaatggggctggattccagaagggccttacttgtgagagctgccacagtgagtttcaaagagggacagggatgctggggtgggtggcctaggatggcctgtttctctggcctagaaatttgaggagctcgggtggcatgttttctgctagcatgtttctgttctctatgttcctgtagctacacagtctgcccagtggtatgcctggggcccacctaacatgcagtgtcgtctttgtgcttcctgctggatttactggaagaagtatgggggactgaagaccccaacccagcttgaaggagcagctcggggcactacagtaagacttaatcacttggtgggagctgggtgtggtggctggggcaggtgggtctctgtgagtttgaggccagtctggtatttatagtaagctccagattagtcagggctacatagtagacaccgtctcaaccaatagaaaagaatcactgcaaaaagaggtaggggacggggagagtggtagacatacagacagatatgagctttaggcaaaggttagaaacctgactccttaatatggagacagtcatatggacagaggcacttgctaagggttgagaagccaggaaagttgggtggagtgctagtgtagagttcaggcagaatagtttgctgtcttcaggaaatggaggaaaggagtgacttgccatttccctttttcatatgtcattcctccaggagccacactcaagaggtcatttatccagacctgaagcccaaagtctctcaccctatacaaccagcgctaaccgggccaagttgctggctaagaacaggcaaactttcttgctccagaccacaaagctgactcgtcttgctagacggatgtgcagagacctgttacagccaaggagggctgcccgaagaccctatgcacctatcaatgccaatgccatcaaggcagagtgtaagcactggagtggtagtagtgatgagtactaagttgctctggctagagactgttgtttaatgatagtaggccacagagggtgtttattagataaggtttaacttttggccctagaagaggccggagaagtgaagttccttcagaaattttgatctgtcatgtctggtggttcatgccttggaggctgtagatataactacctagttcctatcagactggtctaggtagtgagctccagatcagcctggattacataggaccctgactcaagtagggtaggcattctaatacatgcccataactcaagtattggagaagcagagtctaggctggccagggctatatatacagcaagaccatttcaaaaagccagaacaaatctgcagaatatccagaggctttcatctttctccaggctctatccgacttcctaaggctgccaagacgccactgaaaattcaccctccggtgcggctgcccttggcaactatcgtcaaagatctgggtatgggatggaaaccacacttgatccagggtgggttgaaggtggagaaacagtttgggtggtgtcaggctgctagccgttttactatccaagagccatttcttcccctgagttttcctttccccctgagtccaaactgtgtgtgtgtgtgtgtatgtattcttttttttcctttttggtggtggtgttttcgatcaaaacccagaactcatattctgggcaagtgttttactattgaggcccatttttggcatagcagtgacttttcataagtattttatgatctggaaacataatcaaatgttgtttttgaaatatgtgttaagtagcttgtaggccttttcctccattactactggtctgatgaccaagggaaattgctgggccagggtaaagagggaagaaagaatggtaaggaaaactgtacaggcaagagaaggtgtgaacgttttctattcctcccccccttcactgttagtggcccaggcacctctgaaaccaaaaacacctcggggcaccaagacaccaatcaacaggaaccagctgacccagaaccgaggcctggggggcattatggtgaaacgttcttatgaaactgtgagttgggaaagctgaatggggtgggcttttgtttctgataggagtctgagggaggcagcgctttcattatgttgccctatccttttccagatggcaggggcaggggtccccttctctgccaatggaaggcctctggcctcagggattcgttcaagctcacagccagcagccaagcgtcagaaactaaaccctgctgatgctcccaatcctgtggtatttgtggctacaaaagataccaggtagggagcagtctactatgggaggggctcagagactgataatccaagttgggtgcattggaagtaggggtatctgagaaagatagcacagaaaagagtgcgggtgtcaaaattgtagagtgtactgtggagcccctacttgttcctcttttgctctttttgaccagggctttaaggaaggctctaactcacctggaaatgcgccgagctgcccgaaggcccaacctacccttgaaggtgaagccaacactgatggcagttcggcccccagttcctctgccagcaccctcacatcctgccagcaccaatgagcccattgttctggaggattgagcatcttaggggagggagatgggatgagaggtagaggggtaggtgcccaaggcatacaaacctcaaggatcgagggagggttgaaactggtgtgtccttggaggacttggaccccctctggggtgattgccagtaactccccctttttgggcttctccatgcctgtgatgggagcctacaggaacttgcctgtgtgtctacctaccctatttgggggttgggacccacagttgttttggacagctgggctggggggggggagggttttttaaattttttaaaaattttacctccctttgtaaaagggatggaggaggggaagagtaaacatgtcaggtggtggtacctggcagggggaagggagagtgcactgccatgtctacctttttttttttctctttattttctaattgggggtttctcttactgtccggtgtccggactttgctaattagtttgagggctctaaggtggcatccaaccccagcccatgctcgctctttcttccctccccttcccccctctgccttttatatgccaattctcagaaataaagatctttttgtccgttttttaacctcgattctgtaattggttcttatagtgaagaataaaaagctgttttcttcagccctcaggctcagctgttctctgctgctgctgctgctgctgcgcgcgtgcggtgtgtggtgtgtgcggtgtgtggtgtgtgcggtgtgtggtgtgtgcggtgtgtggtgtgtgcggtgtgtggtgtgtgcggtgtgtggtgtgtgtggtgtgtggtgtgtgtgttgggggtgtctttgagagggaaaatagaggacaaaagacaatgaaagaggtacagatggcgcttgttctaggagcagcgttatgagacatgcagccgggctgtggggtggtttgtgccactatccttgtgggactcgggcttctcccactggggctggagtccaagcagcatcttggtctagattcattcagagctctttaatggctttgactctgcacagatgggggttagaatgtcttcctgttagccacttttactctccctcctttttggtgctgagaaattgatcccagggtctggcgtatgctactcacgtgctctactattgccaccacctacatcctcagcccttcactttcatttaagcattctagcagccagggtcagatgcatctcaccaggtgggggtggttgacacatacctttaatctcagcacttgggagtcagaggcaggcagatctcttaaattcaaggccaatttgatctacagtagaaggagttccaggagagccagggctacacaaagaagccctgtcttgaaaacaaagatgcatttcactttagtgtttgtgggtgtggtactgcagtactttacagttcaagcttagtggtatatatatacagactgctggatttgtacagctagtgttagcacctacccccactgttgagtgtgcagtagtactgttttctgttttgatttcatctgcttttttggtttggtgtaaggatcagatacctgagcagggtacaataggagggacaccttagaacagttggttagttcaaccaattctccttaggcactttagagatagaagggcctcatggctcagccaaggccacagactggtttcctgataatcacagaacaagctggtgaacccacctgatagcctttccatttcattatcgtcactgtggtcagctctcatatcctctcttgttcctgaacctacgagactgactcatgtgcctgactggggatctgtagcacttcccctcccacctccttgaataaatgtgtatctcttagcactgtagtctgttcttcattgtactgccttgaaataggcctcgttaatatacttcattaaggctacaactgctgagcagactttgactgggatagtagccatctgctgttggtctcattgagtccaagtgaaagggagtagggggcggacagcgctgaaaactgttttgtcgaggatccagttgtacagaaaggaactgacctgaggatgtgggagtacctgagctccacaaggcaaaggattggaaacacccaccctccgcttctactcgcagggtgaaataaaagattgaggtgcaggtctggggtgaagtgaaggcagatcgcatgccaccacttggcaaagaaagagctgtgctgtcaagaagcaagcccatctttgtggctgcttaatgaatattcacaattcttcgggccaatcaacgctggaatggaacggagcatgccaactagttaaccctagaccaataagcgtcgtcggtgggcggcctttcttaaaactgacttaataggaacccttaaccctaagaacacggtttctggacgaatatgctggcgccggacacaagcgtcacttcctgcagcactggcggaagtggcttccccacacattgcgattttgagctgtgagttctggtagtgactggtggcgggagaggttgtaggcggcccataccggagaatcgctatggaggcggaggattcggatgtcgtatcgctgcctcgtggtcgctttcgctgctgtctctgcgacattactacagccaaccgtaagcggtggctagtgagggaagggggaggttgcaggctttcactttttaggtgctagtgaaagagttatttaggttatagtttttgctggcactagggtcatccacctctgttttcactcagtacgtcccagggcattcggagagtggggaaattctcaccggttcttctcacaatgcaaaagctccatagtgaaactttcactattccttttaaaacatcacctttgtgatgttttaaacatcacatgttttaaaacatcagctctgtgcctggtgctttactggtctctggaatcaggaagggagggattcaggaattcactgtctgcactgagacagtttcagtacaccatgggtatgtttacagagctgaagcatcacagagaaggcagtagttcaattggagactcccaatggggaggatttctccagaggcgaggatgagtgaaacatggtggcctgagtgaatgcagaaggtgccagtgaggaaaagggtttggaaagacagactgagattttgtgacaccaaaagacacttagtgacatctcagatcctacttttgatgtctagaatgtgatctcccctaaacagggtcttctggtattttctttgtgaatgacatttccccttctcccctccccctgccccatcagggcaagccaggaatttaggacagtgccttgtccctgtactttcatggcactaagcagctgatgataaaataatactaatagctaatttcccacacttactacataccagatggccagagctgtttgtgaatgatacctatgtggtaggcgagatcatttccatcatatatgggaaaaggatacatttggaatacctgctatttatctctgaggattagtcagggccctaatttatttacttctacatatgaccttggacaagttgcttgttaattcctctacagtgggcagatgtcgctctgcttaacacataccattggcttaagaactacctgcactgcagccctccctcttggaaatctcttagagaatgcactgtgtggacaaaggggaagaatatcaaactctgtccaaatgttaccctttgtctttgaaggaacagggtttctatgtatagagaagagagcaaggggacaggtatacaaagagttactttatatgcttatgtcacacgcacacttgtctctacaggacccagcctagatgcccacttgaaaggccggaaacaccgggatcttgtacaactacgagctaccagaagggcccagggacttcgaagtgtgtttgtcagtggctttcccagggatgtgggtgctgctcagctttcggagtatttccagacttttggccctgtggccaatgttgtcatggacaaggacaaggtagagtgagtgtctttgggattaatttgtcagatggatttgccttatataaaagagagaaaccagcagcctgttttggcagtttcctaatgtggctcatccttggtagacatttcagaacttggaatagcttagttttgggagcttctgccaccttggatttaatccattgacaagagttaattatggaggacttgtttaccaaacattgtgtcttttttgtttgtttttttcgagacagggtttctctgtattgctttggaacctgtcctagaactcgctctgtagaccaggctgacctgggattcacagagatacacctgcctctgcctcttgagtgctggagttaaaggcttggccaaggctcgtgggggctggagagatggctcagcggttaagagcactgactgctcttccagaggtcctgagttaaattcccagcaaccacatggtggctcacaaccaccttgaatgagatctggtaccccctgttggcatgcgggcagaagactgtatactaaataaaaaaaaaaaatagtaaaaaaaaaaaggcttggccaaggctcttgacctattgcctgctaactgccatccctccccccccccttttttttttttccttcagttctaggggattgcacatgggacttttgaatgctaggaaagtggcctctgtctatctccaaaccatcctcatagcctttatcaatcacttcttgtgtactggtgagacaactgcaattgtgtgtatatgatatgacataaaagtccacattgttttgcttatgactgtccagttgtcctagcatcatttatctataagcccgctctttcctcactattatgttgaaaagtagttgactatatgtacacagtgttctgcctgcgtgtatgtctgcatgccaaaagagggcaccagatctcattgtgagctaccatgtggttgctgggaattgaattcaggacctctgtaagagcagccagtgctcttaacctctcggccatctctccagcctggcactattttcttaattactttatagactgcctttttataggaacagatgatataaaaggacatgcacttttacccataagcactcatgtttgccttgctcctgctaatgttttaccttaaaaaaaaaattatctcactggcagttgtggcacaggcctttaatcccagcactcgggaggcagaggcaggcctggtctgcaaagctacacagaaaaaccctgtctcaaaaaaaaaaaaaaatttaattcagctctgttcagctcatccaaatcataatagccttagctgtcatattgttgctaattctagatggtaagttccttgaagacaggctttattagagtttattagcagtagcagagtttttacaaaatttgttatagtttggtgctaaggcttttatctaaggcttcctacacagtagacaacttctgtaccagtgagctgcattctgagccaacatggattctaaaaaaaaaaaaaaaaaaaaaaaaaaaaaaaaaaaannnnnnnnnnnnnnnnnnnnnnnnnnnnnnnnnnnnnnnnnnnnnnnnnnnnnnnnnnnnnnnnnnnnnnnnnnnnnnnnnnnnnnnnnnnnnnnnnnnnatatatatatatatatatatatatatatatatatggtttttcgagacagggtttctctgtgtagcttcggagcctatcctggcactcgctctggagatcaggctggccttgaactcagatatccgcctgcctctgcctcccaagtgctgggattaaaggcatgcgccaccaatgcccggcaaaatttttatgtgtgcacaaaattttttattttatgcatggcccatggtgcacatgtgggaatcagaggacagtgtgtaggagtctgtcctgtgctcaggggactgaactcatgtggtcaggtttggtggcaagcaccttaccccagcatggatctttttttttcttaaggttttctgtatggttatgtatatatgttgagtacaggtgcctgctgaggccagcagagggcactggattgtatgaatctgcagctggttggtttcagactgtctgatgtcggtgttgggaactgaattccaggtcctctgcaagagcagcagtgctcttaaccactgatccatctctccagaattccacatatggaccccccctgccatggattcttattgttaaaagagctagagctgggcagtggtggctgccccggaatttgctctgaagaccaggctggcctcgaacttacagatatccgcctgcctctgcctcccaagtgctgggattaaaggtgtacaccaccaatgcctggcaacagatgagattttaactggcagccaggaataaaaatgtatgggataagagtggagattactcatctaagtatattacaaaaaccttttacaaaaacagcaagtaatacttccagtatattggttgtttcccattttaaagattctcctctactgtcaattaccaaaccatgatccttgctcttgtatgttttgccagggggtgtttgccatcgtggagatgggagatataactgctcgggaggctgtcttagcacagcccaagcacaggctgggggaacatgggctgcgtgtccggccgagggagcagaaggagttccagagcccagcctccaagtctcccaaaggagtggactcaaatagtcaccagctggcccaagcactggccgaagccacagacgtagaggcacagatggtaaagcttgtagaactgagggagctgtctgaggctgagcggcagcttcggaatcttgttgtggccctgatgcaggaggtcttcacagagttcttccctggtgagttcctgctctaaagctgagctcttcctaacaccttgttggtctacctgcccctgtgtttgaaccctcagtcttctcttggctgtgtttcatttgcttgatcttccgtctttgtacctcaggatgtttgtccttgattctctggctcctcctgtcttttttttttttttgtcagccagtcttgcactttattgccttttcatcaggccttaaacgcatacttgcgaagcgggtacagcctctccttcctctgctgcttcttggtcttcagcttttcttcatgtttggtgagctggcggtgcatagctctagtcttcttgggtcgcaggtctagaggcttgtacttcttacccttgtagaatttcctgaggttttctttttgagtctggttaattacggtgaggacacggacaatggatttttggacgactcgtatcttggagagtttggaagcagcactgcccgtcaccttggcgacacgaagttgggacagctccaccttcagatcgtccagttgttttagcagctcctccttcttgccgcgcaggtcccgagccttaatcttggccatagctgcgctgctcaccgctgaggtctcctggtccgagaccctgtcttttttatccctctttattatgtgtgtgcacaagtgacacacatgcttttttatccctctttattatgtgtgtgcacaagtgacacacatgcttacagaggtcaaagagtgactttcaggagttacttctcttcttccaccacatgggtcctggggatcgaactcaggttatcagacttggtggcaagtgcttttaccttctgagccatcttactggccccctactgtcttttgacctgtatcctctggtacctaggctgtgtggtgcatccctttggctcttctataaacagctttgatgttcatggctgtgatctggacctcttcttggatctggatgatatggaagagacccaggtgagtgagctggggagcatacagtcatgtgactttgggcagatgctttacctaaactctcatgttttttagttttatgattataaaacaggcataatagtacttagccagaagcgttactgtaattttggaaatgtggatatggatgtacattagatagaatgaaaatgagttggcctggaataggtaacagttgtgttgggaagataaaacatttccaaattctgttgttggatttttattgtgtgtgtgtgttgtttttttttttttttcctcttttcttttttggagactgggtctcactatgtagctctggctggcttagaacttgctatgtaaaccagggtggcctggaactcacagagatctgcattcctctgcctcccaagtgctatgatcaaagacgtgcgctaccattggctagcttcaaagcactgttgagaatgggttatgtgaagctgtagagtaaagcctgtacttagaggacagaggaggaggggcattcactccctctcatctccacctacagccagccccacaggctccagagactccagaggctccatctgtggactcagcacttgctttccccctggatcctcaggcgctggcctgtaccccagcttctcctctagactcaccgtctccaacttctctccaagattctgaggccctggaccttgaaaccacgtcttctctggcaccacagacaccagattctgctttgggttctgacactgtcacttctccccagtccctgcctccagtttcaccactgcaggaggacaggggagaggggaaattgggcaaagcttcaaaggacgagaaggaggaggcagcagcagtgttggagcttgtgggctctattcttcggggctgtgtccctggagtgtacagagtccaaactgtgccttctgcccggcgccctgtggtcaagttctgtcatcggccttcaggtcttcatggggacatctccctcagtaaccggtactttcacgttggggttgaggaaggctggctcctacggtctgggatgtatgattagggagtcctgacatggagggtttatgcctgtggaattgagttttttcttctttggttcagtcttcctttcttccaattatgtcacctcctatctagagtccatttcagtgtttgtttttgttgggatgttctgtactcgtgagtcagggtcttgctctgtcttctgtactggcctccagcccttgattctcctgccttagcctcctgaatcctgggattacaggaatgtgcagtttgcagtgctgtgtttttttttttttttttttcttcaagacagggtttctctgtgtagctttggagcctgtcctggcacttgctctgtagaccaggctggtctcaaactcacagagatcagttggcctctgcctcccgagtgctgggatgcaccaccaatgcctggcttcaaaaaagttttaaattatgtgtttgtttgtgatatctcatctctgtagtgagaacaacttgtgggagtcagctctctccttgtaacatgtgaatgctagggactgaactgaggtatcagtcttggtagcagactcttacccactgagccgtctcactggtcctctatcttttgagacaaggtttccatattccctattcaatctcctgagtgctgggattataggcatatgcttaccatacccagctattgaacagttctatataagcagcatggtttatgaatggtgactgtatagaatgagcatatggaatgtagtgttgcctaaggttccactgatacatactccccccaccccacctctcaggctctgggcaaatgtcccatcatttaaccacattccctagatttatttattttgttccccttcatataaccagtgttttagcaaaactttgggaaaaactctttggatcttattttagctggtcctaagtctataatgaaagatagaaggatattaggtctgaagaattcctacaccataacaactttgtgtctccattgtcccaggctggccttgtacaactcccgtttcctgaatctctgctctgagatggatggtcgagtccggcctctggtgtataccgtacgctgctgggctcagcataatgggctgtcaggtgagaatgaggagagcacagacttggcccgagctagtgttaggcaaagggagggatttagggtgaaaaaaaggtgggcacaggaaccagggattataaatacttcttcctaactggaattattggttattattcagggggcggcccccttctcaataactacgccttgacgttgctagtgatctacttccttcagactagagaccctccagtgcttcctcctgtggcccagctcacccagagatcaggtaatgcagaacagcctctactgtcacctccgcagcctcttctcaactgtcaccccactttctacccgttcttccccaattttcctacttccagcctgaccctctcttactgtcacaggtgaaggggagcaggtagaagttgatggctgggactgtagtttccccaaggatgcgtcccgactggagcccagcaccaacctagagcctctcagtgagtctggggaacctaggagacaactaacaataatattaagttctagaataggcacggtcttcactaaccccatgactgttgtttttttttttttgatttatttattattctgcctctatgtatcatgtatccctgcacaccagaagagggcactagatctcattacggatggctgtgagccaccatgtggttgccaggaattgaactcatgacctctggaagagcaggcattgctcttaacctctgagccatctctccagccctcatggttgctgttttaaggatgacaaaaccatatcttgggcagctaagtaagaggtgtattccctagttacactgctctccagggcaagcagcagcatctgggcaggacatggctgaggagctggatttctcaggacacttttgaagccctaagaagggaagaaagtcctactgaagtagcagcagggatgtcccaattatggcttctaagtgacagacacccttttcctaatctgccttttccaggttctctgctggcccagttcttctcttgtgtttcttgctgggatctttcgggctccctgctgtccctccgggaaggttgtgcattgctggtgtcagggggcctgccttctgatctttgggaggggctgcgccttggccccatgaatctccaggatccctttgacctgagtcacaatgttgcagccaatgtaaccagccgggtggccagacgtctgcagaactgttgtggggcagcagctagttactgccgaagcctccagtaccagcagcgttccttccggggccgggactggggactactgccacttctgcagcccagctcccctagctccctgctgtctgccaagctcatccccttaccacctgccccctttcctcagatcgttacggctcttgtgcgagtgttaaaggaagcgcttggatgtcatatagaacagggaaccaagaggcccaggtcagagggtcccaggaccaaagacccttccctgggagggacaaacaaaagacagagactagatgggcaagagaagagctgggaggaggggaatgagaagtcgcagggatgtgcaggggaccacagtgaaaatggggtggaagaaatggtaatagagtttcgagagacgtctcagggcagggccttgctgagctctgcaccatcaggccagttgcccctgatgacttggaagtgtctagacaagttggctgagcagaagcccatggaacccgaagtggctggagaagagtctcagggtgagacagggaaggaaacatcacacctctcatcagcgagctggcgctgtgctttgtggcaccaagtgtggcaggggaggcggcgtgcccggagacgattacagcaacaaaccaaagaagaaggcagaggaggcaccaccactggagcagagtggctggcaatggaagctcgtgtgacccaggaactgaaaggaccagacagtgagcaacagaggctacagggggagcccctcctcacctttgtggcatctgtctcccaagctgaccaggcgctcactgtggtaccagtccaagattcccaaggcctgttccctgggcttcatcatttcctacaggtttttctccctcaagcacttaaaaatctccttgagtgaggaggcgacctcacagacaataaagctggtagtttatttaatacagacaatggacaactgcgatttctacctggtaacactttctctctgtcttaatgtagcctctgccctgcttggcctgactatcctaaaacagtcattatgtccacttcagaggtcttcccacctcataccacatttatagggagttccacaccacaagacaaaggcactgatttctgctgccttttctaccctttaacactagagtgagttcaaatttcccttaagttggatacgagatttccaaatttggatatgtgtaaattattgcattagaactggtctaccttacccgaccttctggagcacagcccggcttgagaggtgcaggtgacatacaagtttgccggtcccctttgttgtagagttaacatcaaggttgtttagtcatcgcagacctactttcagatgttttcggccatgagccctgccggacagacaatcccttaatagaaaaacccgaacaggaacaaaaggaatttagtgacttgccactccttccttgcagcccatgtagttcctagtaggctagagctactagcggttggggcggtgcttccgccggttctcacactctccccgccctcagtgagctccgtctcctatcaggcttccgattggtcggccacacgggcggggcgggctgcccagagccatactacgcaggcgccagctctttgcgctccaggcagtgcgccccaccccgtgctttttccaactcagcgcggctggagacggaactgtcgtgcgtatgccttttatgccgtcctcgctttccggccgctgtttccgtacggctgtccccttaccccctcccttgtctccctggcggcttactttgcggcagcaccgacagccccaccccctttctctgcggaatcaccatggcggctggggtaagttcgccggctctggtgatccaggtcacttcatccaccgccatcctttgactgagtcgggtcagtcggcgccaggagagttccagacccaaacggagagccgatctggggttcgcaggccgtaccgccggagagcagggttcctagggcctggaggggaactgaggctggggctcggaggccagaggtggaatgttctggggttgaggagaagagatgctgggtcttcagtgtctggatgtttaaaaagtggctcagctgcactgccattttaagatgtggtgtctgggtaggttggtggaacttttgcgaccgttttgtgggtcaccgacggggacagtgaaaaaggagagggtctttgtgggcaggagggactggcacagttaggagttgtcttttggggaggtttgggagcagaggagtcaaggaacactgaaggcagaccatttggacacctctggccaggttttagtagggagacaactggaaacactgaaggacaggaccagagcgatgttagtgctcggtgaggaaaaacagactttttaggaagaggagttgatgagcagagcatgccgctagaaatcaacgtggccattctgaggggaactttgaaatccattggtcgatgtgtgtgcttgtgaggtgctaccagcttggctgtggccatacactgggtcaccacgaatgaatgaaacaagggctctgggaggcaagggtgtgtgtatttgggcagatgaagactggtgggaccacgaagttctgaagggaagaatgctgctagtgatgtccttacgggaggtcacgtctgtcagcaagctttatttagcagctggtacgcagttctgttctcgctatttcagaggactctgattacatagggcatactcagttaatttggtttaccagaaggagtggagatgaatcaaaggctttgaaagtgtggggagtcgctttcaggattcttgtactcatgtccattctccacccttcctctcacagaccctgtacacatatcctgaaaactggagagccttcaaggccctcatcgctgctcagtacagcggggctcaggtccgcgtgctctccgcaccaccccacttccactttggccaaaccaaccgcacccctgaatttctcagaaagtttcctgctggcaaggtgagtagagaagcagggaccccaaagagccctaaaattctattattttggacatggcctccatattctattcttcaacattgaagttactttttaaagatttcatggggccagggatgaaaggccctgagtttgactgtccaagcacccagaaggaaaaataaaatcattttgaagccttctggtaatcctagcattctggagactgaggcaggaggattgtgtgaggtcagtttatataatctaatatgagcctttctataaagggaaattcagagcagtttggtgactctcagagttacagacctgctttggatttgtgggatgaaatgtatttgggccaatacatacatactaggtttcttgcaagttggattcatatcccagagtgcttgagtagagataaatatccaacgctgagtatggaggacggcaaatgctgtatatgtgtgtgtgtgtgtgtgtgtgtgtgttgttgttgtttgtttgtttgttttttgagacagggtttctctgtgtagctttggacactatcctggcactcactcggtagaccaggctggcctcgaactcacagagatccatctgcctctgcctccccagtggtgagcgccaccactgcccggccaaatgctgtgtgtgggttgcacctaatgccttgggtagcggagttgtaggtggaggactgtctgaagacatccatacctgagaatattctttattttgagatggtgtcacactagccctggctgatttcagattcagactgggaataagggtatgaggccgtaatttcacatttcagccatgtttgaattcttagtccaggcactggattcagattacgagagagttactgattatttttcatatgagtctcagataatgttgcaagtttgcatagcaagggttgtctcaacattcttgacagttcaatcccaagaattggctagtgagaaatccctgtgttttgcttttgtctcttaactacttcgcccctaggtcccagcatttgagggggacgacggattctgtgtgtttgagagcaatgccattgcttattacggtaatttgtggggacacaggattgagaggttctggggatgaggctgtagaagtggctgggagtgacggcagtggacggggtgggatcatagagacctgggttggtttgggcatgatctttaggttccaagctttatgttgtgcctttgcagtaagcaatgaggaccttcgtggaagtactccagaggcagcggctcaggtggtgcagtgggtgagctttgctgacagtgacatcgttcctccagccagtacctgggtgttccccaccttgggcatcatgcaccacaacaaacaggtatgctttggaacttggcagagatggggtcaactcctatattggagggaaagatgccagtgatgtgtggcagtgcaaagtcgtaagtgctcgccgtcagtatggtgggaaatagtcatgtcaactctgaagagactgaacatgcatgttttagttctaatacattttcaggtgatcctagattctagtgatagaggctgggggttgagccaatgctgattaaatggaaagggacttggtacccactaaacttgaatattcaaaacaacaggccactgaaaatgcaaaagaggaggtgaagcgaatcctggggctgctggacactcatttgaagacaaggacttttttggtgggtgagcgagtgaccctggctgatatcacagttgtctgcacccttctgtggctctacaagcaggtaaggtttgtaaagagcccattagacaggagattgactggtgctggggtgccctgggttctacttaggactcatcagttaatggctgtaggaatcccaggattgagtacggtgggtgttttcattttaggtgatgttgcttagtttcttgaaaataatgggtttaatttaaagatgggtaaggctgggtgtggtggcttacacttgtaacctcagcacttaaggtactgaggcaggaggatcactctggtatgaggccaacctgggctgtatagcgagatcataaattaaagataggtaaggatggtcactgcagcgtcaagggcttttggaggcagatccaagtccctatcctggcttcattatttactggtacagatagaaggatgtaagaattctcacagttctttattttattttactttatctgtgttaaattcaaggtggtagtaatcactgtgtggttcctatgttttttaaaacatttaaaattgtttcatttatgtgtattagcatgtatgtatgtacatatgtgtaccggtcctaaggagttttgagctaccaagtgagtgctgggaattgaaccagggccatctagaagaacagccatctgtctgtctgtgtatatgcatgtatgcctgtgtgagggtgtcagatcccctggaactagagatacagacagctgtgagctgccatgaacctgggtcctctggaagagcagccagtgctcttagctgctgagccatttctccagcccctcaggttactggttttgttgttgggttttaaagaatgttgtattgatttccaagcaatagctggggatccattttgattcagaattgtagtacagtaggaacaaagaaaaaagctcctactgttctgaccgtatgcctcacggggttcattataatgtttctgtgcctatagcacacagcttgtaagtactcaagtataacttgaacccaagtattcagaacttgaagttcccaacttcctgatttctgtgatctgtctccatgaccagatttagctctcaccccctcctatttttggcaaacttgaaaatgacaggggctggagaaataggccaacagttaatacttgctgcacttacagagtactcccagcacccccatgatgccctaatagctgtatctccctttccaggagatgcgatgccctctgaattcaggcttctgtgagcactagaatgcatgtggtgtacagatatatgtgcaggcaaaacacccatatacataaaaatggaaggtaaattaagaatttaagacagtgtgtggctgaagagatggatcagcatttaagagcactctgcagaggattcaggttcaattcccagtacacgcatagcagcttataactttctttaactccagctcaaggggaatacaataccttctggtctcagtgggcaccaggcttgcacacggtgcgcagatatgcatggaaacagaacacttgtgtaaaaatgaaataaatgttaaaattttttaaaagaggatagtgaatttttctgtgaatgagttaaaagaaggactgttctgatcatactgggttgctgaactacactcttatttggttggtgtcttgggtttggttgtgtcatcagtgtgcaggttgtagttgcagtgtggagctagagtgaggcccagtgacatggtttatctggcaatgctctaggttccattcccagcttcacacacaaaatgtcttttttgggggtcagcttgtttagcaaaataagtctagtagccacccccacctagcatcacccccttggatgctaggttggagcccagtgtcttgtgaatactgggttacattgtgctactgagctaagcccttagtctcttacatagactctgttacagacttgttgaatctaacttaagaaaattttgttgacatgaaatttaaaagattaagaataatagacatgaaattcttgtgtaaaagagtatgacaacaaggggctggagagatggctcagaggttaagagcactgactgctcttccagaggtcctgagttcaattcccagcaaccacatggtggctcacaaccatccactatgagatctggtgcactcctctggtgtacagatatacatggaagcagaatgttgtatacataataaataaaatcttaaaaaaaaaagtgcacttgcctggtggtggtggtggtggcggcggcggcgcacacctctaatcctagcacttgggaggcagaggcaggtggatctctttgagttcgggccagcctggtctacagagtgagttccaggacagccatagctacacagagaaaccctgccttgaaaaagataaaacaaaacaaaacaaaaaacccaaaacacaaaaaaggaccctttgtaagtagtcctcttggagatgtagtgatttaaagttttgctgttggggatggagaggaaagtggagctgggggtaagggtcttgtgctcttgttggagatctgttcatagcctttctagtgttgactttgtttctgtccttccatcctggcaggtcttagagccttcttttcgtcaggccttccccaataccaaccgatggttccttacctgcattaaccagccccagttcagggcggtcttgggggaggtgaagctgtgtgagaagatggcccagtttgatggtaagtctggagacagcatgtgatcagggttccgtttgttcctgtcaacagcctttgacttttggtgacccctgaacataatctatcaaatagttactggcacactggaatgcagagtgtgataacttgtgtatgctccttgaggcttgtttggttgtccttgccatcactttccatttgttgcctggtttggaggaaaatggaaagaggcagtatatttacttccctctctcctttatcagctaaaaagtttgcagagagccagcctaaaaaagaaactccaaggaaagaaaagggttcacgagaagagaaacagaagccccaggctgagcggaaagaagaaaaaaaggcagctgccccagctcctgaggaggagatggacgagtgtgagcaggcacttgctgctgagcccaaggccaaggacccctttgctcacctgcccaagaggtaagcgtgttggaaggcgttcttaacctgttcttagcctttgttcctctcacatacatctaggcctgcaatttgaggtagttgctgcaaatagtgatgggtgtaagtatagtcctggtctcattgtagtccaggctggtttgtgaggctgtggggcagaggatgcccttgaatttctgacttatcttcctgcctccacctgggatgtaccagtatggaagtcctggtgtttttgtttgttatttgtttttttgagacagctctggctgtcctggaactttcactgtagaccaggctggccttgaacctgcctctgcttctctagtgctggaattaaagttgactgaagaatagccatccttgttcagttttgacctacctgcattttgtgatgttttaatgtgactatcctgtagaagcactcccgtgatgactggctctggaggcatggatactaaagggcagggacttccagctgaaagccttaatttgtaggagttgttggttggttggtttgtttgttttttggtatgagaccaagaaaacttaagctctaataggtgcttctttaggtaggtaggtgtgtgtgtgtgtgtgtgtgtgtgtgtgtgtgtgtgtgtgtgtgtgtgtgtgtgtttctgaaaggggctggaactcaggttcatttaagacaatttgctctgcctgtgagtatatctgcaaccctgctctcagaatacaatgagttctgaatcaagtgattaacccgagttttgcacaagcatagatctaatgagaagaattttgttatgttaaaaacctattcttttgttataatatagacacatgtggtaggtccttattatggacagaaaataagtaacaatgaatggaaaggtttctccttcctccttaggttttttttttttttttttttgggggggggggcttttcgagataggctttctctgtgtagctttggaggctgtcctggcactcactctggagaccaggctggcctcgaactcacagagatccgcctgcttctgcctcccgagtgctgggattaaaggcgtgcaccaccaatgcccggcatccttaggtatttttaaattagtttattttgtgtgtgcatgtgggcccactcttgccagccatagagtgatgcattgatgtgtatggaagtcaggacaattgagatggagtcagttctcttttaccatgtggttcttgggaatcaagtgaggtcatcaggcaagcatctttacctgctgagcctttggctcttatgtacctttgaggatgttaatttaatgcctatttgttgtattaccacgatgcctttctgggatgccaaaagtgtttccccttggtactgttttatttgctattggttggtgggtggttctcggtttttagacagattcttatgtattgcaggctggtctcagactgtagctaagagtgatcttaacttctggtcctccttgttggtctcagtcccaagtgctggattgctgacatgagccattacacctcacatcccttaggacaactctggctgtcattgaactctcagagatccacctgcctctgtcctcctgagtgctgggattaaaggcgtgcaccatggaggctggagagatagatggctcagcggtaaaaagcactggttgctgagttcaattcccggcaaccacatgatgactctcaaccatccacagtgagatctggtactctcttctggccagcaggcatgcatggagacagaatactgcatacgtaataaataaatcttaaaaaaagtcatgtgccaccactgctgagcccccttacccttaggctttttaatcgcataaaattgaaggcagtgatttaactgtcatttgttgaagatttcattctgatccctttaagatctcccagctaggtgagttttaggagcttatgtttattatatacacacatatacatatatttaagagtgctgggaattgaacttggggcttcacccatgcttaggcatttgctgtgccatctagctataccactaatcctagttttttgaggcaggatctgttaaatgcctatgctgagattacagatgcagaccatacttggtctgtgttatttgggggaaaaacagatggagtgtgagaaagtctccagtcctaccttttggttggaaaggggaggttttgaggttttcaggcccttaaaaagagttgtctggtggacatttggagaccagtctgggacctttggttaaatggcagatttctggctttgctatatatagtataaccttggaccaggctcaacatttaaactcgtctgtaaaatgagaaaaacttagactacagcttttgagttagggccttggcacttgccgtttctgaggatgacattggacttttgattctcctgcttctctgcctcccatactccctgagagtggtgcagtggtcatccctaacttgaagcaatatttatgcctttggtagggggtgtttgagacagggtttctctttgtagccttggctgtcctggaactcactatgtagacagtctggtctcaaactcatagatatacttgtctctgctgggattaaaggtatatgccactactgcctcgccatttaagtttctttagattttttttttcttttttttttttctcctggtttttcgagacagggtttctctgtagctttggaagctgtcctggaactagctcttgtagaccaggctggtctcgaactcacagagatccgcctgcctctgcctcccaagtgctgggattaaaggcgtgcgccaccaacgcccggcaagtttctttagatttttgtgcaggagtgctttgcctgcatgtttgtatgtgcctgcctgatgtttgtatatgcctccctgatgccagaagaggtcagagagggcgtcagatgccatggaactgaaagtggttgagaaatacaattgggggggaaaagtagaacctgagctatgggggaagtaatacctcctgtgcctatgttagctttcttggcatctgggtatctgaccctgagtgtcaggttactttggtaaccttttctttgataagcttttcaatatataaattgttattgggcaaagaggaactagaggacctgggcataaagatttgaggtggctatcttctgcttgcattctggttccagcctgtaacccgagaagtcctgtgtggtgggtgagttttacttgagcactgacttgtggttcctggggaatgtccaggagggcctagactgagaaaaacagactacctcgcttttagccaccacctgggggcagcagctagctgtatcctccataccttgctggcttcctcatgcatgtctaatactcttaggcccagaaatgtcttagctcttgttcatgtccctctatctatctttgctcctaatgctgtgagtgtctgacattgcattacagggaccacttctttcaaactggtatattttaagtgaaaacaccattgacctagagatactttgcagttgtagcatggcttcctgcttattagcctcctggtgttttctctttagtaccttcgtgttggatgagtttaagcggaagtactccaatgaggacacagtgtctgtggcgctgccatatttttgggagcactttgataaggatggctggtccctgtggtatgctgagtaccgcttccctgaagagctcacccagactttcatgagttgcaacctcatcactggtaagaagaggggtgggtctggtggatggaggtcaaggtggggcgtcatgattccaagaggctgaatagtctcccttctttctcccttagggatgttccagcgattggacaaactgaggaagaatgcctttgctagtgtcatcctctttggaaccaacaatagcagctccatttctggcgtttgggtcttccgaggccaagaacttgcctttccggtgaggaaggtgctgggggtggtctcttttagtgggcaagagtataggaaactgggggttttgagtctgggccagtgtgttgtgtgtgagggaaatgttgtagattatacataggaagtgtgttcacatcattgtgagtcctggtgtctgagctagaggttgcagagatacagagcaatgtccagtgtctaaccacatgcttctgttctgttttttttatccccagctgagtccagattggcaggtggactacgagtcgtatacatggcggaaactggatcctggtagcgaggagacccagaccttggttcgagagtacttttcctgggagggggccttccagcatgtgggcaaaaacttcaatcaaggcaagatcttcaagtgaacatgtcttgccatcacctagctgcctgcacctaccctgcaagggagatgggggtcattaaaggaaactgaacattgaaccctttcctgtcctgcctcctttgtgagtggtggcttcttcagagttgttgcctatgcctgaggcatcactgtggcagggcagaagtgttcagaagagcagaagtagagaggcctggcctcaatttgcctttcctgccttgcttcccacaacgatgctcttctagctggggaagatgagaagcagactgggtggtggcatgggcttgcttactacctaattcttaggaatcgtattcccagaccttaaacactgaagaaggtctgctgataatgctgggccatgaacagctctcagtatacaggtgttttttgtcatagctgttgtcctctgtatctgtagggagtcacttcgtgtcccatagtcctcatgctcagatagcttgtgtaaatggtacagatgtcttcatatgacctacatatgttcagtgctctacaaaaaaaattgtttctctctagttgaggaagtaatggtgagaaaacacctcagtgtggtgcattgttcccaagtgttgggaaggcttattcctcacaggtgccttatggggtgggtaggtggcactatataagcctgcagcttaaatgctacaagtattctagaagactagctactgactggtctcttggtctttacctggttatggatcagctctggtcgtatcctttgttttaaaggtatgtgtttgtgtgtacacatttcatgaagtgcaggtactcccaagaggccagaagagggcgttggggcccccaagagctggagttgcaggccattgtgagctgcccaatgtaggttctgagaactaaactcaggtcatctggagtaagtgctcctaactgctgagccatcttttagcctccagtttgtttctgaaacagtactttccatgtagtgtaggctagcttcaaacttaagactctgccttaactcagcgtcccaggctttagaattataggtgttgggtgctatcaccctgggctttgtatgcctgctttctgacaggaaagtttgggaagggttcaaataaacacatctgaggtggaggctggctgctgaatccagtaggtgtcaccctgaagcctagaataaatactaccacatcatggcaattgttacctaacgtttcgctgaggccaacagtttcaattaaccccctactttaaacttgattttattacgttttcagaattttggccttttttttttttttttttttttttttcctttccaagacaggatttctctgaaacagtcctggctgtcctggaacttactctgtagactaggctgtccttgaactcagcctcctgagtgctgggattaaaggcaggcaccaccaccacctttcctagctgttgtttttaagacagggtctcactgtagtctaggctggcagtgatcctttttgtttcagcttcccaagtactggagttaccattatccaggtgattccctaagttttaatagctcaccttaggctgggcgttggtgccacaagtctttaatcccagcacttgggaagcagaggcaggcggatctctgagttcgaggccagcctggtctacagagcgagttcctggacagcctctaaagcaatacagagaaaccctgtctcggaaaaccaatatatatatatatatatatatatatatatatatatatatatatgtatatatgtataagctcaccttagaaattagaaactaggctggattcaaacctcatgtggtatgagagtgctcgccctgggtcagtcctgtactgtgtaaatcggatgtagtgacaaatgcctgtaatctcagcaaccagaagacagaggcaggactgctgcaagtttgaggccatcctgagtgtggccagatcactcagtgttaaagtgaaacctaggccgaaagcaaagacataagagactagtgggtgcagaaagttccctttgttcatctctggtacaggattttgtgtttgtgttttcttatcccatccttagtccaggcatagaggaaggatcttggagggagggggatagccttactagggataggactgttccggatctggctgtttggacctgcagctggggttttgtgaaagagtgggtggttagtgagagctccagcttggaatctacatggctaaggatgggttggttcttgctccaaagctgctcccaggcagctcattttgagttggatccaaacttgtctcctgtgcagtttggcctccgatattctcacagtactagatgctggtgtggggtgtgtccatatctgtttctggggcctcactgaacctgtcagactcctgaattctgtttcccaccccaccccctctgcttgtgcaatcttcactgccttcttggtgtcctcttcatcttcccgatagctgaagatagagacgcaaaggcacgctgtgtgcctcttgagggcaggccttggcctaagagggaagcctgactaaaagggtaggattctttggggtgggccagtgtttgggcagcggcctgtagggcagtcttcttgatctggactggaggtgtggcagggaccctcaccttcatcccctttccctctctgagcctctttctctgcaggaagggtgactcatccgcatatcctgcttcatgcttttgtccctggtagtttgtacagggtgaagggtggccaggttgttaggtaaaacctgcacctgggggaccagtacacagattatacaaagctgaggcgagggtatgcaaggctgctggggtgggcctctaaggaagagttaacaggagtttctagttgggggtggggtgcactggggaagcacatctggggttagttctgtctcgccctgccctggggaggcctgagtcaccacactgccagcctggccttccccccatctcagcttgggctgaaggcatcttgttagagcctagcccgcctctgccatcagccaccaatacaagcatgagcctgtgaatgtccctgggtgccaggtagtttttcctgtgtgccagaaaggctctgtgccaccagccactgtctagagttggccgcactacctatacaagctggcaaagttaggggtcaagggcagaaggggagggggtgttgggaataggtcaggctgagaacacagctgcgtgttggaaaactagtggaatgaaggaaggaggccgctgtatccactctcagctcagagggaggttacaaaaggttacagggcctagagttacagacgtctgagtctttacagagcctggagtgtgaatgggaaggcagagagagccttgctttagtttgtagataagccagtagataactggtcataagcagctcttttagctttgttggcaattctgcataagtcacttactaaaattaaagttcattaaggtttttccaagatagacttttttttaaaaaaaattatatcctgctttgagccagatctggacagctgcttctcttcctgggttggacccatcccaccagctgcccacatgccccaaatggtgccacttccccttttgagagatgaggggggtgcgcactctcgagtgttgaagaggaatgaagtgccccacccaagcatttctgaaattattaagtttccatggcaaccagcactcagaactcaaaatgtccctccatacctgtcagatgggctgtgataggtggccatagcttgcccagagtcacagtgggagaccagtggtatactcttaacatcccagtttattctggccctctgtgtttgatatagttaagggtacccaccctgtttgcttccccaatgctgtgcagctgaaatattgatggccttgaaggttagagatgctaccaccagctcctgtctgtgtgctgtagtcaggctggcatggcttccacagtaggctgtctctactccagtggagtgctaggatgccctgtgctccagtgcctagggcttggttagggatgcttctccagggggtggtactgttcgctttaatcataaaaggaagaatgccttggggatgtagtgatgactcatttggatatttcagtttctgcgtcccttccctcttccaagtcccccttttatttccctgatttccacaagggagcctatatatatatatatatatatatatatatatatttgaaagacgatttttgatatcccaggctagccttgaactcattgtacagccgggaatgaccttgtagttgtgttctcccttccccttactgctgggatcacaggtgtgtgatactgtgactggcttatgtgatgccggggaacccagggcttcctgcatgctcagaaagctctctactgattgtgctacatccccatccctgactgcacagatcaggagctgggtggcaagactgtggcactattttctgataggatctcccgtggaatgtgcctctgtttccagctgtccccccttgctgctgctgcagcagctgtcatgtgaaggcctggagctggctcagcccttttgcaactatttggctggttctgccaggactgggggtggatggtgaggatgggcagagctgatggtaggtagttggaagcgtggcagggcatgagggaactggtggagctaaggaccggctttgagggctgaggaagggttgtccaggtcaagtgggaggagtggagaaagcagctgaacaggaaagggaggcagaaaggcttcccttaataggaagtggagcctgagatgggacgacaacttggtagatggaagggagagtgtttgttgtagcgggaccctagccagtcatcagggagatcctcgtttcccctgactcacaggctgcagagctgtaacacactttacagccagccttcaccatgtggtacgtgagtcacccagctgcctagggtgttggctgccttatggtggcaatgtctgcctggccctgccctgtcccacccattcccattcatttctactgttaggacaggggttagtaaacacacccctttattccactctcttcaaatagtagctatccatttctttgattcagccttacagaatgtacctcactcagagactgtcagaaatgccatctcaagtcatcctttatttcacatgtgaatgatttggagcccagagagggggagtgacttatcacacatacttccaagtctgttcttacagccacagactgagtcacctttgctcctaagtaggagaatactttcctcagaagccgatagtaatttcagtggacacaatgtaacttttggagggccgagagtaggtgtctttcaaaggttccagcagctccaggctctgtgctaagaagcctagaagtgaagcaagtcccagggcaggctcagtacagcaatctaagtcctggagtgggcagagggcacagggtgtagcaaaggcaggactatgagtgacaggaacctcaactatgtggtgactcaggctctgggcagcctaggcccttccttctcttctcagcttgatcttaagctgggcttggggaagtgtgagcagaagggaaacccaggctggcattccttttcctaggaaggcagaggaagttgcaaagctgagtccatggaagagttggggctggtatgccccgatctctgtccctttggggagggaaagcagactgggactgttgtattcgtcccagctctctcctgctttttacaacactgcctgcccatttggatcatttctgtctcccgccttccttcccctcttaagcaatcgtgctttgcccagattttctttttcctaatctctcacagcctccccatgcctgaagtctgtccattgctggcttgggtacccagcctcccctctgctcagctctttccttttctttgggatagtctttctaagatttcttccaggcttctctctctccagtcagccccatcattcttgttcctaaccagctttaatttggactccacttggccctagtgccatggacagtttccctatatttgagcaattcaggaagttcttatttgaagtttgaggttagttacaggctgggatttgcactgaccaggggaagatcgatcttatttggttaagagggaagagttcagagtttgagaattgcttaggaaatggtcagattccagaactacccaattggttggctgggatagattaggaagagctaagagtgaatggagaagggcctgtttaacggggtccactgggcctggggcttggtgggtgaaggtaggctctgggagaactccatgactctcaaaagggttggcagtcatttttttgtttctaagtgtgccatccaaaaggaccttcaatgaaggggtgggggttcatgtttctaaagagactacaaacagaaaacttctgcttcctttctgggaccacacttgaaaagctgttggcttttttttttctttctttctttctttttttttttttttgtactgatttcagaaaaagggacttcggcaaaaggaaggggaatcccctggcagaggtcccatccacagagctcccctttgtggttactatggaaacaggcataataggaacaaaacataagcatgttgcttggcaaccttggagcctaaggttcatcacacacacatactcataactccttcatttcagggaacccccccagggtaggagcgtcattgctggaagctgggttatcccggtgacgagtcctagagctcatgtggctttgcctgttgagtctggagtactgaggtgtgtggcacctctaaagagtgatacattgccaaccttacagctgacctgaaccctggctggtgttggcaggagtctgaaaccttgatggaaacacaggtttcctttacagtgttagaacaggggggactcttaaagtgagtgagtgtgagagggagggagacagggagggagggaaagacaagaacatctggtgttgggtgtgggataggagaataaaaggatagaaaattcagcttccaattttctgaaaacacaactggcaaggaactgaagacaaggtaaggggttgtgagccattccctctggactgtgtggctgtcggggagggattccatcccgctgaattccctgttgcctactccactgacacaagtccttggcctagtgttggatggacaaaaatgtttatgcagctgctgcaaagatctacaagtaggggaattgttccgtgggggctgacagtcttgagaagatgtaatagacaggcaagacacttgtgcaaagaacaaggattttggagccagttatctggagaacactcattaacatgtcattgagggctggggatatatcttagtgttggcctagcattgatgagactctgggtttgataactaacatcacagtaaataactccgtttctgaatgattgctgtatgtctgccagtgtctcccatacagagcacaggaagagggaaaatctctgtcttttgggaaaataaatgtgagtgggaactttaattttccctttgccagctgtgtgactttaggtaaatcagcaccctctctgagactatttccttatcaagtacctcccttttagggtatgactaatagataaaaagaatcacatacaatggctgttatggtgggcttgggggaggggacaggatttccactgaaaacttttttgtgtgtgattcttggatacagtgtctcactctgtaacccagactggcttgaaactttatagtccacactggcctggagctcattgattctcctgcctcagcttcctgagcattcagattatagctatggaactgtcacacacccatccaaaagcttgaaaacccctcctctttggtaattaggaaaccccaggtctggttccatttgcacgaccctgatctttaaggaactgggtccagactatctgttctcttagcctggaatgggacaggagccagttctcagaactcagccctaaccaagtaatcttggcatgtttaaccctgaatgaagtgtctggacagtgatccctgctctgctaactgctccaaaagccagccttgcccacctgccttcttccctgttgaccaaaagggtggccagaacaaacagtggggcagtagaattggctcagagcccaggaagcgctcgctcctaggaggccaatgcagtgtgagcagaatcacactgatgctcactcagagcccttcccctttcctctttcttatgccaatctccttcctccaagccctgccccacggccaccaccccatctggagtgctgctgcagataccccgtgttttagggcttacatcacatcataaccaccttctgaaagcccaggggtaaagaagtcaattcctttttgaacatgcatcagaaaactcattctttcagggaatcaaatgaaaattcaaagttaagaatcggttggtaaatgattaactggtggcttttggggagagtgtctagatagagaaaaagggaggaatttccttttgtttttttttgagacaagtgttatgtagcccaggctgactttgaaccctttatgcagccaaggtcacataggatcctgactcccaccaaactaggcagaagtttattttcattgttctgcctctctatattgcctacatttcaaggactgggatgcagctcatttgcacagtgttcattttatcatgtaagaggccttggatgtgagtcttaacacacaggcaaaaccaaagcaaacaaacaaacaaaaaccaaaacaaaaaacccccaaaccaacaataaagacctaactaatacccctcattgttatggaggcattgaatccccccttcccacccagagagctgtgtaacagccctggctgtcctggaactcactctgtagaccaggctggcctcaaactcatagagatcgcctgcctctgcctcccaagtgctgggattaaaggtgtgcaccacaattgcccggtggcattgcttttttaatgtcatcagggattaaacctggtttaggattgcagagttctttatcttattcttggtctatgtttaagagatgaaataaatgctatttatatatggatggggcctcactatttagcccaggttggcctctcacagagattgccaatcattgcctcttgagtgctgggattagaggtataaatatgagtttaaaatgaatgaaataaaatgatttgatgtggtgaacatttgagaggctaaggcagaattgctgtacacatgaggacagcaaaacctatattgtgaattccaggccagcccgggctacattataagaccccttgtcaataaatcacgattgagggctagcctaggagatgactcagcctgttaaatcactcgcctccaagcctgatgacctgtttgatcccagtacccacgtggttgaaggaaccaactcccacaagctgtcctctgacctccacatgttcatacacactaaataaataaattaaagaatgactggctattgagttttgctttttgagttgtttgacctgatccttactgtgtatctctgggggcctggaactcactttgtagcccctagggagtactgagtaagcagtggatcttttacttttttttggaaaggttgagcttatggcagacagtatgctcctgatgatgatgtgtttggtgggtttgagtaactaaatgagagagagagagagagagagagagagagagagagagagagagagagaagagagaggagagggggagatatgtgagtggccaattctctgctttgcctgtctttgcatgtccatgcctgtctgaatttctgactacatttctccaccttggcgtgtccattatatatgtgtctgttctatcactccctctgttgtctccctccccccacctcctgtaccctgtgtggtaactggacctggacacagcccccagggctggcaggagacttggctgatatttttagcctgtaaacatgtttgccatttcagaggacagggcagggctggtctcagcaccagcccactcatgatcttggagcgaaggcgctcctacctcaggccaaggtctcagttctcccgcctgaggtctcttagggcatttgggaaggaagggaaactggagtgggcagttgggtagccacttgccagggagggtagaactcatgggtaagaagaaaagggaggtgtgtggggaggatgtagccagaaggtccctgcaaccccatcattaggcatttaataaaatccacatctagttagaagtggctgtgggaaatggctgtaaattggggagctggagaacttgcaaatgggaatatgggggaggggctgaggggcgagagaaagattggggaggcaaagaaaaagctggatcttgggttcctcaaggttagtggggcatggtggctcatcccagggagacagaagcaggcgaatctgtgaggctacctgggtctagccggttccagggccacatagactgctgccctccaaacaacacaacaaaatctccaaacggcatggggacagtgtctatagaagagggtgagcagcctcatggctcgtccaaggactgcaggtctgacactggtgcgctgcagctgctgagctgtaccgtggtatggtgcataggtaatcccattcctagggttagggtctgagtcttagagtcagcatgtgttgtagagggagctcagagagcctcgagaaagtctgaaggctagtaatgggcgcggctgcaagaagcttgggaaccaagacaggaggctggggcctgggactaaagtgtctaagcttgagagaaagctcaaaggtctgtgttgaggctggaggtcgaggctgaatcatcttcttggctcttcctgcagaatgggttgacactgggttccaactgtgaggatgagcccccgctccttcgagcttccaggaatttcttgccggtggagagagacactgctcaaactggggtgggaagatccagacactgggacgggagtaatagatgggataggggaagggaaaaggcgacgcctccttgtccctgagccccctcgccagtctcctttcaccgttccactcccgggtggcttcagcgttggtctcgctctcgggtcccagccctgctcgggccccgcccggccccgccctctccccacagctcggggcagacccgcccgagttacaagagccgcctccgcgcgcgggggcccggccacttggagcagctctgccgcggggactgcactgtccgccctgccagacccgccccgactggggctcgccgtcgccagcagtctttgcactgcgacctcgggccctacgccgcctatggctgcgtcctgggactgagcccgcaggtagggaagcgaagcgcagggtggtgcgcactggggctagggccaggggagggagggactggcgaggtgcatttgtggtagtgtcaactgcgagggttccaaaagttcagggcaaacccggccgtctgtggctgccgggacaggcgacgcgtcgcgctttgggagtggagctctctccctggagttggggcacaagttgggctaagttagaaaaatcgcttggatatgtgctttgctgcgctttatgtttttcccgcgggcggactcttcttcccaactgcattgcagggcgctgcgttcccggcctggtggcctctgtcccaccccttcactttggggcggtggctcagagcgctggtgggttcctattccatgtttactggagaagttttccgagatccccgtcgcagttctcccgcccctccggcgcccctacaccgcgtgccccctctgctgtccttcgcggctctccacacctctcccgcgaacttcgcgtccggagtcccctcagccccaccctgccctgtaccaccagcctctgcctttctggctcttagcggcgccttcagcagctccccttcagctgccccgccctagtctagcccctccgtgttcccagatccaagggagtctttcccttcttccccgcaggcgtcggagcctggaagtttgcagcgcgcctccctgcgggatgggtgggagtggaggtgggggacataattagggagattcctgcgctggggtgggcggggaggggggctgtgcaagcgactcagtccccagaacctcccttgcttcttctagaggcggtactttctccccaccccaccccactcccaaactcgtccgggcgggatggcccccgccccagcgcctggctggacgccagcagcctgaggaatgtagtggttggagtcggtgactaattcaaaccagaattcgggggggggggaggggtgaggggcaaaggggagggggaaaggggcagtgagtaggcggtgggggctggagcgctgggcgtaggtgaaggacttcactgcgctctctggaaccctccacttttgctgtgtgagccagcggtgggggggggggggcgagatcctgctgtggggttggagaggcagcgtgcttagggtgtgtgcagagagctgtgttatgtaaggctttcccatgcagggaggggatgtgcagtgtgcaagggcctgggcctcctctggccaggagccccttgcagtgtcagggagggtttggggagctgcagagccttggtggtgctgagttgacagcagggctagctgtacttggtagtgagcattggaagactcttaggggggacccggggatatcccacaactcaaactgagtcctgacttagagtagtgtgtgtgtgtgtgtgtgtgtgtgtgtgtgtgtgtgtgtgtgttgtatgtgttgtgtgcatgcttgctttcctgaacaatctgtcacttctgcacaatgtgagtccagaagattgtgcaaatggtgcctgcattggcgccctggtttgacagggtgtggtcctgggctgtctctgaggccacgaggtgttcttgttctcggggtgcttgtattctcagtgttcctgctctggggaggggatttgtaggaaagcttcctgagggagttggggtccttggagagtgacctgaaattcccaagagaaaaaggacccagaggtcttcgtctgttcccggaacactgctggactcttgataaatggttttgaaacagtctcccattaaaatttaacctcaatggcaggggccatctccactgcaccccttttctagtagctgcctaacatatgataggtgttgggctgagttcataggatccagtgattcagctgggtgctgaatgtatgtgagtgctttggttgtgccccatgagggaagtccctggggtagggtgtgcctcttttccctttcccaagctgaatgaaccattagtttccttttctcaccttaaaaaactacagggctaggcctgcatatgggctatagagtgtgcagattacgatgtaaatgggaaccccttgtttaagggcacatccttgctttgagctatggggtaagggagtgtgaggaagaactgggagcatgggctgatttagaaaggactaggccctgggtgctgatagggatgacatctggaagatgtctgaacccctttctaaagctcttgtccctaagaggttatgcaaagggaccttgctaagagaaccaggatattcagggagacacatgagtcttactgctttaatttaaggcttactgctgataatatggaggtcagtagcaatgctccccacagacatggttcaagggtgaggatccaggtccaggaaaggacatgagagagagtgaaccaaggagctctgtggaagaagagtagcattagtcaagggcagggagggagctatggggtcctgggtcacctcagacccagggaggctctgcttagaggttcagagaaccgccacgcctggctcttctgctccacttggaactgcctgttgggctctggcagagcacaccactctgagcctggggagctggtttgagaggttggggtaaagctgtgggggtggaggagtgtgtaaggcactggggtgtggtcactacctttttcagaacttgggaactgcctggggacagacgagaggcagactgggagagctagtctgacttctgaagggatctttgcctggatgtccccaagtttctctccttggggctgggctgaccacgtgctggtattctcataggttagaggaagggaggtggatatcaattagaatgtgcattaaacttggcccacagcagtggtgagtgtctagagctttctgctctttgccccttcaggtttcaaccaggctctcaggaacttgcaattccctggatttgatcatgggctgctttccgaagccttcctgatgatagcatcatccatacctgagtttgttcaaaaagtgtcggcatgggggagggaatgacacagactgtttctgcagaaatgcccgtgtgtgctttgatgaagctcccctttctttctctgagccccatttcctactgggcctaaggctcaaataatcggtcttgggtttgtcactgtttgcatcacaacaggggttgttccactgtggtcttgagcctctgtgtctttgagtgaagtttgtgttactgcctgtgagaggatgtcctatggactattcatggggtgcttatactgtgctgggcctagatgtgccacttcttgttggcctcctggaacttggagggcagacgcagttactgactgctccagagtggaagttccatagcagtgcacagacggcagttaagcaatgaagtaagctcctttgtcccatatgggtccaggccttgaagtttgtgtccagaggccttcaagaaggacagggcagccttgggtgtatagtctccacagatggaggttgagcagaaagcattgcacacagcctgtcagggagcggcatcctgcctggtccctgggggctggagcggaggttctgggggaaggggaaatgcctggagctgatcctggctacgtgtcctggctaggctgtgtgtgtgtgtgtgtgtgtgtgtgtgtgtgtgtgtgtgtgtgtgtgtggccactgccttttgaagacctggccctgagtcttttcactacatggcctgaccactggggggcgagcatgcagcacctaccagggaactgggtggggcccagagtatattctaaactgtaatctacccccccccccccccccgaggcaactcagatacttctccccttggctcctcaaccataggacactgacgtcacagtgtcttaatcccagctgtcctgtctaaagctaaaccttctttgatgtggccagataaggaacttcccactggataatataatgctgtccttaggatgtcactagagaggtggagagtccctcctggtcacctggataggggaaggagagggactctccccgatgg

SEQ ID NO: 16 - DNA, 44764 bp, Cricetulus griseus
  >scaffold_9 dna:scaffold scaffold:CHOK1GS_HDv1:scaffold_9:47068117:47112880:1
  misc_feature 21445..21544: /note="n is unknown"
  misc_feature 24079..24178: /note="n is unknown"
  misc_feature 28500..28599: /note="n is unknown"
  misc_feature 34003..34102: /note="n is unknown"
  misc_feature 38520..38619: /note="n is unknown"
  misc_feature 42312..42411: /note="n is unknown"
atctaagtcagcccgaaactaagagtaactcacctaagcaaagagttctctccaaatcggactgtttgacgaggactcccgaggctgtctgccacagcggggctccgaggacgtctgtcacagtacggcctcagctcgaggaaggcgagaaaggcgcgccaaagcacggtaattagcataagagaacgacagctcctattggctacgcttgtgccgtctgatgatggcgggaaaggagtggcgtactcggcggcgagagccttcctggccagtcgcagccggttagaactgattagaacaggcctttcctctgccaggttcctctttattcgtgagtatttgaacatccccgcggtcggtagaagaccagatgtagatctgatcgtggagctaaggggaggagccagggtgcaagggttcccgccttgcctctacccgggcacacaaggtgccacaggcaggaacttggtccgcgggcgtcttgaagtcctggctagagaaaagatggggacccaggtcctgcaagtacatttgctgcagattcactaatccctgtggccaggtaagtgagtgagttccggggaggagagagccacagcccctgtaggtggcagctgaaggctttgagagtcaggaagaagctacaggtgccttcagagaaaattgacttaccatgaatctgtttcccaaaggcacccgagtgcctactgcggttttcggtcctaatgaagatcatggtgcccattccagaaccacagatggcaaatgtgctgttaagcatttgtcatgtctcggtattaactgagacatgatataaatataaaaatagaccactatacgaaagggaacttggtatgaaaaacatgagatatccaaacacatgtagttaatatgcattgaaatcataaggttttgcaattgagttaaataaattatagaacaaagaaagtaagaggagcaggaaggaggaggcatttctcttttttgctcttacccctgggtgatgcacgactgtgctgagtagaagttagtttcttccttccattttatttttggttttgagatttatgtaattacatcatttctccccttccatttactcttttcaattcctcccatgtaccccaccacgaccaccttgtcctttttaaaatacataacaaaatgtgtgtgtgtgtgtgtgtgtgtgtgtgtgtgtaaatatgttctgttcaaatatcaaataatggtatgtatgtttttaggggtgatcatttggttctgttctggctggatgccagaaatgccaggagtgcaccatggttcttgctccagcttcttgttacatttcttctccatttatatatataaaggaggttatatttatataataacctttaatgcaagccccactgactggaaggtacactaaggtcatgactgaactaataggcacttggacgccttttgggtaggctgactggcctgaataccctctttggcttaccacagtttctgccagaagtcctaggaaagcccgtagactaattgttttatggtgtcctgtttcctgggatctctgtgtttttcccttcttcctctaatctgatatttcatcttctttctacaaaccatcctcccttgggctgtgaaattcccttcttgactttagaagacacgggcttggagtggttctggtggctgatgatttatcaggcatcttagctcatcaagttatacacccctgaggtgggacagtctcccttgcatccaagagctgcttgtccaccatttcagaatcacagcagaaccatgtctctcatttttcttttcctctctccccaccccttaccttttccccaagattctagaaattaaactcagggccttgtacatgtgagttaagaattctaccactgagctgcaatctcccatccttttcattcattgaattctttttccttttttttatttctacacaaggtctgactaaatttaccaattgagctatctcttcagcccctctatcttcccatttgatcctatactctagaattctatcatacagtacaaactatgtctcaatgggaaatataacatcggagaagaccagagctcttcacaacagaaagcttcctttgcttattactaattgtggccataaacttggatctatgacctcactcaccgtgagactatataatcatcgtcatacgaaacaaacaggcgagggaggtacttggaactacagctttcaaaacctggacacgaagaagcacaggataggctcatctggtcctctacatagagaagaaaagagctaatttcaagaactatttcatttactgaacctgtacatggatttccagccacctttagcaagatggattttttatagaatatttacctttgttttctatacatgcatgtttccctgtatgtatgtttgtgcagcacatgtgtgtctagtgtcctggaggaaggcagaagaggatgttggatcccctggaagtggagttacagatgtctgtgagctgccgtgaaagagctgcaaatcacactgcttctaacaaagctgcaaatgttcttaaccactgagccatctctccagctcatgttggatttctaaaatgctgggaattttgttatattcttcctcaaaatattttctcaagccatgcaggcaatgctggtcctggccttcaattccagcactcacgaggcagaggcaagtggatctctgtgaattcgaggccagtctgatctactgagcaagtttcaagatagccaagtatacacagagaaaccctgtctcaaaaaagttttttctcttccaacaataaagttctgatatggatgcattatggcttgtttcaactttgaaaatttgtcaagagatgagcttagataaacttcttttagatacccagaatcatcgctaggtaccagattcatagtgtcttccaatgtggggtctgttctgtagttttcccaaggagtctgtctctattcagttcacatagacacaaagaatttagcatgtttactgtctaaaaaatttcccatttctaagttttttccactttttatttgcattagaaacaagattgttttacatgtcaatcccagtttcctctcacttccctcttcccctgtcaccccccaactaaaatcctacctatcacatatcctttctgttccctagggagggtgagaccttccataggggggccttaagagtctgtcgtatcctttgggatagggcctaagcccatccccgtgtgtctaggctcagggagtgtccctctatgtggaatgggctcccaaagtccattcctatgctagggataagtactgatctactacaagatgaaactttttttaacttcatatccactctagactgttgtccatgaattatcttactacctttttagtgtctgtcctagttagctttcctgttactgtgataaaccactctgaccaaaagcaacttaagaaagaaagagtttatttcactttacaggttacaatcaagagaagccaaggtgggaactcaaaacaaaagctcacggaacgaaacacatgagtgctgcttactggcttgatcagctcccttccttatacaatccaggaccacttacctagggatgggtctacacacagtgtgctcgcccctcatacatcaataagaactaagaaaatgcttcatagatatggccacaggtcagtctgatccggaaaggtcatcagtagtatttcactttttccagatgactttaggtttaagttgacagctaaagataattatgagttctcttaggtcagaccacagttggccaactttgcagaaagctttttcatggtttcacttctcaggcatttttgtgaaattccttcatcttcagtatctttcaagagccactgcaaagtagggatttgaactgagaacctcagaatagccacttcagagacattctcaggtatatgtatccttgagttgtgtccatgaacatcatcaatcatattaaaatgattctctgtaacttctgaaagtgctgcttaatcttggactgtgtagagacccaatgacttcaccgcaggctacaagtacagtgtgctctaattagatggagcttgaatttaaagcaaacatgaatcaacattgttttgtttctttttagatgagtgttacaagagagagaaaatttgtggtatggatttgggtgggtgggaaggtggggaagatctggaagaagttgagggagggaaaatcgtggtcagaatatattgtacaaaaattttcaattaaaaattcgtgatatatatatatatatatatatatatatatatatatgtatatattagactaaaactgactgaattctcagtcctgagtcttctagactcagtatttctacatactgttgaatacacaaatttcattgtaccatctttcatgtttttgtttaatatcatcaaggatgtgttttattgaagagcccaattcaatgatactagaaaccccacttgtatactcacaaatgaagccagcagtgtgcatgcctaccagtgaccctttagcatcaaacacaggagatccagaagacccacaatagaaaacgttatcccaggtaacaacaccaggttcatggatttttttctggaaacttctttgggtgtacatatagatatatggtatagaatcgctgccacagaatgcttctctcccctgaatgttctcacatttcctcatttgctcatcttgaggtatcacagtacaaccatcaacaatcttatacttgccatctgggtgaccaatcatatatataaacccactaagtgatccagaaggtgttctattacagagtcctgtaggaatgtgctgtccatttttcttcagtttcaggacagcatagtcaagagttacatcagacacctcaaaccaaggttcaacaaaacaatagctgtcttccttgccggggaacacttgaaaatcaaatgtcactcttacacactcactaattatatctggccacttacttggctctatgccttcccctacaatgtcatttattatatgtcgacaagtgaaaatgtacagccccttaaaaaggaagcaagtagcactacccctgttcccatcgttgttccaaactatgagcccgactgagtcactgagctgtgaaaggagtttgaagactttacctggggtggagttttgggtcagcttcctgaagttttctctatgtgctttgaataaggaggtttccttgtttttctcactctcttccttgatgtatgctctcagtttttcccgttctcttttcaatgtggggtacaaattcacaatgtatccttttaactcactgaagtttctgtcctctaactcagatttctgagctgccatggccacccaagggctctcctttctctccacatcaatctgaaacagcttgccctgtaacacatcaactggctgggtgtttgctatggtggtgtcattgttaatgagtcgccaatgggcactctctacaaaggaattaaacctgccatccttcctcagagtggtcttgatggtctctcctttgaagccatagacacagagtttggtcccctccttgtgaagtttcctgcacctcagaattctttgttgcctattcccaactgcatgtatgtaaaatacaacacactcagcaggtgactggtcaaagcgaccacacacttcattatcttctttctcctcactttcagttttggaaaatgtaatgagcacatggctgccatctggaaaacaacggacgggcataccaaggtttatgaacccttctattccttctatgccacataccagcatttctttgcctgggtgtctttctatctctcttttgacaaggtcaaggatgtttagtgcctcatataagctagctgtctcctcatctgtaatctcacaggttgaatggtttataccaaaagtgatggtaattttcctattttgggaagagttctgaacttgtggagttttttgttccaaatgtgatctttggtcctggtcgttggtcatgtcctttggtctttgtctacattcctttttcatttgagaaattataggatcattttgctctttggagacctgaagagaaataatagacactttagaaaacttacaacggtattcctctgatttttgtgtaaaatatgtgtcatattttctcaataagcaggcagaagaaacataactcatccagatgtctcaaaatctaccagttccaatagaaagtgtttcatttgtatcttgtttattattttaaacaatagattaaaattgataagcataatgcactgcttagaatttttttgtaatttctttgcacttgcacccacacaattgagaggcagaatctcactgaatagtcatggctactgtggacctagatctgtagaccaggctggcctcaaattcacaacattcatggctcctcaataacttgttttagcctgcatctaccacaaaaacactcacaatttttgcttttttatgtcagttctcaaacaccattaaatatacaggagcaacaacaacaaaaaatgccactgttcagtagatgagaagatcaagtatgtaatgttcatttcctaagttcctttctttttcacattttaaaaataatataatttaagaagatggaacaaagattaacacattagaattgaatacaacaaacagaaggaaaacagcccaagagaaggcacaagaatcagagacccactcgtgggcacactcaggaatcccatgcaaacagtgaaccggaagaaatgatatatatagaggacctgatgcagacccatgcgggccctgtgcatgttgcttcagtctcagtgagctcacaggaactttggctaagtgcctttcttaatcacatgataaccaataaggaagtgagtttctgaaatccagtagttagtctaatattttttccattagactatatgttctgttctataaatctgtactcagaacattcatgttatgagacattatcttaaaaccaggaatgggaagagggaaggtactaaggggaaattatcaaaattgagaaaatgatttaaaaatcaaggcatctgattcctgtgtctgaaaggttaaatttccctgttggtgtaacaggtgtggttcacataccaacgatgtcacttatggcaatgggaataacagtggtggagcctggtgaagcctaagcctgtcatcattagcaataacattgataccctggttaaaacaaagcaacttaaggttatgtaaatttaaagaagcttgtgtgggaagcctcaaagaacgtctcttcaagccgggcattggtgtcacacgcctttaatcccagcactcgggaggcaaaggcaggcagatctctatgagttcgaggccagcctggtctccagagcgagtgccaggataagctccaagctacacagagaaaccctgtcttgaaaaaccaaaaaacaaacaaacaaaaaagaatgtctcttcagtctaacacactgagaaccattcacgtctcaccacttgcaagaacagggatatactttccactattcaactgagacacctaaaaaccaccattagtttgtgtatgtgaatgcaggcctgaagcatgctggtccactcatgtggagggaaaaggacaatagtggggggtcagttctcttcttacattccaggtatctaaattaggaggttaggtttgcacttcaaaggctttcatcccctcagccatggcagaagccctagatatttacctaagagtttcattttgattgttaagacaccatatcacaggctatcctgaatttatgatccctttccttctctgttcagagttctgagattaatcatgtgcctggcctggtgtgtatgagagaaaacaacaagttgtgtatgtggttataagcttgctcagtcttagacgaggacagaggagggattgaaaggggcaggggcaaatctaagttttccatagatattctaagtgtttggatcttctagttttctagaacatggcataaaaataatgagcttatatctttgaaggagcttctcaaatgcctgacacttctcagccttcttggttagctcagggagccttttagaatcatgtcactgagtcagaaagcagacctcacagacccacacatgcaacagagcttttagaagcaagtccttctcacatgcctaacagggttatagtaagaatgaattacagtcatatcataaactacaaagcactgtacaggcagattcttaggattaagtagatcagatatactcagaaagatagtgccatgctagggaactttgctttttcccagtttaatataacaaaatgaatttgatctgtttttccttattgtttcagggaactttttatttttactttttattttaattgaaggctactttgatatggatggatttattctatgattctctccttcagtgccatcctccaaactagaaagaagaaagtggacaagaaaggtctgtaatactcctaatccacaataagacggcttcttggcagaagaaccttgtgacctagggccaaggatggctaagtctgctatgaatgagcagtatttacagacatacctgagaaaaatagcgtaggatctccatattgttttcttgcacacaccaggaccttatgtgagatacacctgatggattagacatgaaacagatagctcagatgaattgctaatttaaaatggtttcaagtatcttcataagtgatatatattgtatatatatattcccaaggtcccacaccccactttccctctctgttcagtcttgtttctcacagggtgataacttcacagtaaagtttgtccatccagcagagccacccaacattcaaagcaaggtactgtgtgtcaggaaccagagcaaacacagccaagagcagatgccaatacccaagatagggttacaattggggaacgcaaaagagtgtttaaattcacattgatgttaaaatctggtcttcacttaggtgggcatggaaggatggttaaaatatagggggatagttaggaaaaaaattagtaccctgagaaggaaagaaatttagagggacatatggaaaagaaatgttgaaagttatctaaaatgatactcaggaaacacaatatctacttagattttatttgttttgttagtgagcggtgttgtttgttacttagattttcagtgtgtgtgtgtgtgtgtgtgtgtgtgtgtgtctttctttgtgctgcttctgaaaagagaaggaatgatttaaacaaaagagttctttcaagcacatgacattggtattgttagccttatttcacctatgaaggacatgaaactctagagaagttaaaatttctttaaagacacacactccagagaatacattttggagtttttattgtgaatattttctaatagaaatggaaagaacagaaagaaaaggggggaatacaaacagacaggggaaagaattagttactgaaaatccaaatatcactctcataattaaatgttcttttttttttttcagaaaatgtcttatgttgctaagaccggccttgaaaactgaatttcaagtctccctgcctcccaagtgctagcagtacaattatgtgccaccatgtcaggttcatgtgatgcttaggggttcatgtatgctgggcaagaagtctaccaatggacaacacccagaactccacatgcacttttaattttatcagattacacctagagacacgttgacattataagcctgtgtcactttctgtctctaaaagttcatgaatatttctcacataatgacaatgccagtttgttcacatcaaacattaacacagttgtggtacacatatcacttttacaatttttttaagacaagtgttgctgtgctgcctgggatggcctcaaagaaaaagaaatttttaaacaaacatacaaacatttcaaaatctggtaatagaaggatgcattaaaaggtacccttacctataggaagaaaattaattaagaacttgtgaaacacaataaaaacacactgaaaatctaacgcaataatgtctttctcacctttggggacagagagtactgaagaaacagacacacaaggttctagctggaggttgataatgtgcaacgtggcctctcagaaacctgttgataaaaccaagctaaacttatttcgatggaggtgacagttacttaacaactgtttggtcgtgctgcagtagaagagcaaggctgaggacagacaacgggatctggtattctaaactctggtctaactcaggctataatgtggaggactggtaagcatatcctaacagatgaagactgtgggtataccaaacctaagattttgaggccaggcctacaaataaatatctgatattttctattaaaggcagtagctgtatctttgagaaaactactgaaatatcaaagggatttgtaacgttgtaattcctggaagaacattcctgccgtggtgcatttatgatgaaaacaggtagcatagctaactcaggggcctgctaggccagtacacgtgactgcaccaccagggcatgctgaacatgcctgagaaagaagtcagtttctgtcagccactccctgcgtacgtttttatactggagagaagcacagacaggaaaacacatttatgactatttgccgcacacaaacacgggttagttcattttaggaggcattttcagtaaaagaacagttaccaattttttagaacttgaagccttatttcttgagcattgaaacaaacaaacaaacaaacagaaacaaacaaacaaaaaaccctttacatcctttctctttgactttgttcttttactcgcctaagaactgccaacaccacccaaaaggaactgcactcactctcctcccgacactttctgaaagaaaaaagctggaggcttttctgcaacattccactgcccgcaggtcctaccaggcttccggtcggccaggaggtggaggtaaatcctcaaagagctgagtttcctgcaaattcaactgtcaggcttctgttattttcctccattcgcaaaaatggctcactgccacaagaaaaagcgcgccttttacaaagggagcagctgtgacgtgaaacacagcctccgcggagccaatccccagccaatgcgaacggataggtggcctccagccacctacacaccgctatcctaaccgcccccctcccaccccccaccccaccacctagccctctaatccatagtttttgtgatccatggcaagaccaatcaggctgcgccatgggtcaatgtcagttctactttccagatttctctatctggggttagaattgtctcaagctggcacaggacccaaacagatatgactgggcggggcttgaaaacgcgcgaaaaagcctggaacctgctactgtgcagccttgagctggacccttgtgaaccacctacttggggtggaggcctgaagctgaactctgattgcctcatcagcaagggcggagaagtcaagactgttggtctgcagcgccatctactgcggcagagtgtccactgaggcctgctgaatcagcaggaagatgggagttagagcaactcaggatcaagaagacagactaaacacccttgtcaggaatcagttttcgaagagggcatcagtctacgtcgctctttctcctttttgtttcccacagcatagtaatttttaaaaatgaaacgcttatttaatatagatgaaattgtttaacaactgcacttcccatatccatctaccataacagaaagagtaaaagtgtctgagaatgtttcagtgaatataacattaccaatacacaaggaggcagtgtctaattggaaatcactttgtgactcagaacatagaatggctgagcctactatgatcataatgtaaacgtattttatagacacacctcaagaaaatagtgtgccaaattcttatcagaagtgatctctacttgctaacttccacaactgcatgggaaacaggccctgtgtagattttgccttaggtgaaagtgtctctggctaaggggctgatgtgtccaagtccacagctttgaacagagacagaattcaaaagcaaacatcagtttcttgtaaagctgaggaatttgaaagtgtagtctacttaccttgatgcaagaaacctgtagaaaaggagctaggtaaaatgtggaaccaaagttgtaatacagtaccaaaaagaactcaagaaagcttatctaaaataatagttagcaacccaggttactatttgagttttgtttgaagacatatttcctctgtatctttcaaacaaacaaataatttaaataatatattcaaagctttaactatgacaaataacactaggaaaagaaagaccattgaggataggaggaacaccggtcttcaataccccaccatctaaacaatgcctggaacactgcatcggttatggaattatcataggattaataaaaatctttttaagaacacataatccacaaatgaatagagtaggtatatgctatgccattccatgttttaagtgctcacatagtttgttcagtcctaagagacagcattctactttatctataaagaactggaaattctaaagaggttagactcttactcaaggccacagaactctagagagcatattctagagagcttcacttataacatttttttctagtagagatgaaaataagggaggggacagaaaggggaaggaagaggagttgagtaccttaaacttgtggttctctgacctgcccttccaactgcccagactgaaggcatgtgcaccacatttgcgttatgcagtatagttgaccaaacccagggctttgtgaatgaagggcgagctctctatcagctgagcccctgacgcttgtacactccacatacactgtcatccttaaatctctcaggtccccatcccaagtcacacttttaacaatttaaacacagtgaaattcatgtgtccccctcccttgagacctccttgttacttagcttctcagggtctgttgattgtagcatgtttaccttttacttcacagctaatatgcacttctaagtgagtgcaagccatgtttgtcttctgggtctgggttacctcactcaaaatgatcttctctacttctatccatttgccagcaaatttcatgatgtcattgcttttaacagcaatgtaccacatttcccccaccagttattcacttgagggacatctaggtttttttttttccagtttctggatattatgaataaagctgctaggaacataggtgagcaattgtccttgtgatatggtagaatgtcctttggatagataccttagaatggtatactgggtcttgaggtagatgaagtctcaattttctgagaaactcccatattgatttccaaaatgactgtttaggttttcacacccaccagcaacagaagggtggtcccctttctccacatccttgccagcatgagtggtcacttgtgcttttgaccttagccattctgacaggtgtaagatggaatgtcagtgttattttgatttctatttccctgatggttaaagattttgaacattgctttaagtgattctgagccatttgaatttcctctgttgagaatcctgtttagatctgtaccccatcttttaattggattgtttggttttctgatttctgagtttatttttgtttgatgggtggtttttcccttggtttctggttcttctctggtcttttggactgagtggcctgggattctggtgaccactgagtctccaggtccagtaaggtgtctccactgaggtttctgggcctgtatgacctctggtgttttgtgtgccaatgttgcttcttgggttgcacatacctgtggtacctgtgtggcctctggggttctgagtatctgcttggtctctggggctcctagcacagtgtggcctcagttaaagcagaagtcttttgccaaagttgagggccaggaatggagctcagggaagggggtgaattgttggctgttgagagggctttagggggtgttaaagtcagcaggtgttgtcttacctggtgtctctagatcatagtaaattatttaaagcatcaatcttactactccaagtttcttcctgcatcaatactactgaagtgcatacctcacctttttttttttttaaaaaaagacatcttcttgtgtagcccaaggtggatttgaacattgtattcagggtatggcattggctcagtgggtaaaggatctgccacccacatgaagacctgagttcaaaccccagagctcacataagcagaccgagtgctttcttgtataccctcaatatttctaaagtaaggtgagaggtgaaaacagaaccccagaagctcctggaacagctatcccagtgtacaaagaagtgaacaacaaagaaagtctgtttcaaacaaagtatgacgaacccctgaagctgtcatgtgacttccatacatgaaccatggtacatgcctgtccttgctcccacacatcatataaatacacacagagcaaataaatatacatttgtcaaagtaaaagaagaaaaacaatgctatcttcttgccttgccttcctgaatacccagattataaatttgcaccattacacattgatttattatgcgttcaaaatctcttttaatttacacaaaacactgttgaaaagaacaggggattcacctgcagaatgtttactcctagatagtttcttcagactgttatataactaatacagagagtcaaatgaagccatctaaagactgtgtttatgtctcacaccccaccacaatggaaggggaccccaagcttcctatatagaactatcggtaatgagccactaaagaaatccactttgcctctctggatttcaatgtcctgtttgtgaaaaggaggagcaattgtaatgatacaatgacatcctatgaaaacatgcagactggcgtgagtgcttctgagactgggctctactcagactgctgcttgccagtttggtgacctccacactaggcccctaggttttatctctaagactgtacaaattggacgtggtggcaggcacccgaaccctgattgttgtgaagattaaaaataattcatgtggtctctaagaggggcacatggatcatcctgggaaggggaattagttgagatctcctggataaactggggatggggtggcaaaggggagggggtgagggatgagagcatgaaggaatgggatggtcaagttgggagagggatagagaacaatggaattgtttttgtttttcaagacagggtttctctgtgtagctttggagcctgtcctggaactcactctgtagaccagactggcctcaaacccgtagagatcctcctgtgtctgctgcccgagtgctgggattaaaggcattcgccaccacagccaggctgaaagagatatctcgatagagagagttattatggggttagggagaaacctggtactagggaaattcccaggaatccacaaggaggaccccagctaagacttctagcaatagtggggagggtgcctgaactggccttcccctgtaattggattggtgaataccccaactgtcatcatagagccttcatccaataattgatggaaccagatgtagagatccataaccaagaaccaggccaacctccaggaatccagtcaaagagagggaggaaggaatatatgatcaagagaggtcaagaccatgatggagaaatctgcagagacaggtgaaccaaacttgtggatactcatgaactctagaccgacagatgtagagcctccatgggacccagctaggccttctgcatgtgggagacagttgtgtaacttggactgtctgaggggcccctggcagtgggatcaggatctatccctggtgcaggagctagcttgttggagcccatttcctatggtggaatgccatgctcacccttaatgcagggggtaggggctcactcctgcctcatcttaatgggcttttaccctttgggagagtttgggggagttgagggggggatggaggagaggcgagagggagaagtgcggttggaatgtaaactgaaattgaaaaaaatgaacttaaaaaaatacttcatgtagataaaatcttcaggcaatgaccacacatgaagactgctcagtgaacagtacagctgatgctgttatcaacatcaacatttaacctcagggacacgcattaggtcgtagagacagggaaaatgaaagttagaaaatgagaaactagacgaggatgtttccagctctgaaagcagaaactcattgtttagccagtcagactacttgaagtcctgcatctgctaatgactcatactatggacagtttttaaaaaagtgggcagaaaaaaatagaaatcatgcagttcacaggcttatgtgcaaatgaaaaggatcaagaggttaaaaaaaaaaaaaaaacacttcacttctggtgtctattctgaatcttatgataccaaaatatgtgaagccttcaccagcccattttatagatggagaagccagacctattgatctgaatgaagtgcttgtcttccccaccccatcttttctccccctctctgctcctctcttcccactttttcctcattacccattttccttcacccccctcacttctttttgtctcttgtgttactctttgctccctagccagcttactctgtctcattttatggttttcctcagctagccttgccagaagccagtatcacagttgatctaagccggttcccagctgatcgccttgttctctccatcacacaatggaacaagaagcagctattgttagcattcagacatcacactggcctgcccttggggacctagcagaatacatcaccaaccacaaccactgcctactctcaaatgcgttaatataaataaacctgtgtgtgccccctgggcagtctgcatgggtggtggtatatccaccagagacgcagaacagtgccactcaatgaaagtcagattaagaatactttcttttctagcaggtaacagcaggatttgccataaaggactccaccaggaagggtagggtttataaagccagtgcctacaattacaccataccaggggctggccagataacagaagtttcaatttactaaaacactttatactgtaaaacaatgaattgaaagtacccactcatcccatgtgcttaccgccttaccactaatgctcacagctaacaccaggtaatttggatccagcctccacccctcagggccggtttataaaaagaaactgcaatggtttcaccaggaaaaaaaaattcggtctagacagtgagagtgtactcacccccttgaagtgcttgagaggaacatccaccctcaggaaatcaccctaggaaacctttccagacaagtgatttgttcgttttcttcattttattccttttattgctgttgtcagcatacaaaatttaaaaataatgagcttcgttaagatacttaattgcttcttttctttcactttaaaaagtcgggcctcttctctcctagctctcccacctaactcttcccggcttagatttctgaattcttagagctaacatcatggtagccatgctagctaatagtaagagacagattgtagagaaattcagccacatgaaaatagcctataagttaaattgttgcaatactatgtgaaataaactcaatttatattttgttttggtggaatatatatcttagacagggaagtgactgaggacgtggtacagaaatcacttaaaaacattttttttttttctataaagagtggctgagttttgaggaagctacaaccttctagtccctggaggaacattcctgggaaagtacgttgatggtgagggtttatattggagccagctattccggcagatagtgcagctctgggtaatactgggcatgtctgcgaaggaaatcagtatcagtcacgaggtggattttcattctgaagtgaaaacagtcaagaaaacacatttgtggatgtttgctgcacacagcttcagacaccagaaaatgggtttgagattttttttcataaagttagtgacaggatttacaggtaccggtttttaaaaatgctaacacgttctcccttgagcactataaaatgagacaaaattaaaaacccctaacatagcttgactttggcttttgttcgttttagtcgacaaggaaagcagacccgcattcccccgcccccctattcaggaacgacagtacgagtctatctctctcactctccatcaaggtgcggtcttcttaaaccttttcacagccaaataattctccccaaaactccaggtctattgcagaactaaagccgtaagttgcctaaaagcgtccattgcaaaaagagctgcgtgctctggtttgcggtcgggacctttccctccagctgaaggaatcttgcctagagaagcctggcaaggtgcagagacgttgagctgatcttttctccatagcaacttacttactctgaagacaaatggacttactggatccaccagggaaagtggagggaagcagtggatttggattcaaatcctagtgagcacgcatctcccgctaccggcttcccctcactagccctatgctttgtcatcatgagtaggaccctttttcacaactaggcaactcactggtcaatgtggctttctattctccagtttcctgtattctgttgtttttaaaatctagtgggaacggggggggggaatgggggctggggtagagggccgtgagatgcacattggactgggcgaagtttgagaagtgtgagcacagaacacagccctgaagccaaagagcctggagctatgctcctgccacagctcctgaaggttcctcgggagaattagctttacagacaggacagggacgtgatctcttttctcacagtcttagctaataaggagaagccttgggacctccctcgtcctgaagctctgcctgctttcagcagtggggagccactgtggcttggttcttgtattttaaggaagtggggaacttgggtgactagggcggttgtgggggtggggggtgaaagcaagcttcgggtcctgaacaatcagggagaagccatggatgcctgtcatgtttcgattttccaattgaagagcccagaccctcacccagaccccttgctttgacaattccgcagctgtgacaggttgcagaaaagacctagcaggatgtaggctccggactcagcaggatgtgctgtgttccacccctctcctccccccctcgcccccgtggaccacaagatatccccagatggtaaaaaaccaatcagaggctaggctgaatgagtttcactgagaggatggaatgtagcaaccacagcaactgctatcagatgtatcaagtttcctgaagttgtagctagctaatcactttaggacaggtacccccagtccagaggtgcaccaatcctgagactgttactatgcaacttgcagattatccagacccctacttgctctacctcaaataaatgtcctgccccacaacagcttgaggtctctcctgctccacctctgtgcccgatggacaagagccctgagttcgaactggaagtaaaaagactgattttgcctttctaaacacttaaaatggaatgatttttaatttaaaagtaaaataacaatctacaaccctcaggcataaaacattttctcaggaaacatattgttttttgtctttgttaatttctagtgtgttgttcattagttacctggctgtcttttgcattcctaactcagacactattgttctgtttttcacagacactgtgtgattgcctcaactctattttaagcaacataagagaaagggacgcatctgttaccagggaatgcaagttgccttttgctggtgtcagtcttctagataaaataatttaaacacagattcagagggctattttattggtgttttaaagaaaaagcagagcaagtaaacgacattgagcagttgatggcggcgaaaagaggaagctgtggtttctgagtgagagatgaagaaagcccgggatcagcaggggaagtctgtgagcagctgcatttgggcgtggctcctcgtgggagtatagtgcctggagtgtgggggcaagctagcttacaggatgtggccctgtgtctgaaaaggggaagtgggcattgtttctgagtcagaactccacaaagtaggcaggcttaatagcaagccattgcacccagaggagagtttcaagggtctctaggcatgtatctccttaaaggattggttattctttccatcttcggttatatcatgactttggttatatcatgactctgaagttactttttgagggacattttttctatccagatgattagaaggtccataggattaactcttaagggagtctaacttacaattctttggaagttttagtatgtcctgttgtttccttgcagcaggaccagcgatagactcaaatcccatccttttaaccaaaaatcaggtaacagtgcagttcaaaaggaattagagacattttcagaaatatcagtgaagtgtaactaacttctatggacaagatggaaatgataaaaatgacttacctttcacctcaaataagtaaagttcaaaaggggacatgcaagactctggaaaaacagttgccaaacattaaacatcaggcagcacaagaaagtcacctctgatcccagaaaagaaaagacatgagcacagtcctatttctgtctagttaaccgagatttccaaggcatagctccgggaaagcaaataggcagagcccacagtctgcctgcactgggaagccacagtgcaggaggaagggcagtgaagcagagagagcctaggaggtcttcggaggatatttcctgaaatgttaacctactgctcatcagtgagtgtgatagagcgggaaagaatcccccagaagagtcagaggagacaattcctgaggctcatagaaagctgggaattgttttcccaaaggtcagtccagaattcactgaggaatcaaacacaacactgcatttgtagatagggcttatggctgttggattgctatcactctaaggaaacattagggataattaatttacaaagacaaaatacttattttagctcatagtttttgagtttccagtgcatggtccagcagccctgttgattgctggggtgcagctccctcactgcaggaataaaatcatttacattatagctcagggtcccacaattctcctcgagggaacacctgcaaaggcctaaggaccactcacaaaggcccacctctcaaaggcaccatttcgctacctccagatagtgccatnnnnnnnnnnnnnnnnnnnnnnnnnnnnnnnnnnnnnnnnnnnnnnnnnnnnnnnnnnnnnnnnnnnnnnnnnnnnnnnnnnnnnnnnnnnnnnnnnnnntggcagaccctaacacttcagttagaaagacacaaagagtacgtagacagacagtgaccagcaaggccatcttctcagtgctttccacaagctgcctctcacaattctccaaagcttgcttagataggtattattactcttactttacgcataaaaaggttgggttctcaggtgttggtggcacacgcctttaatcccagcactggggaggcagaggcaggaagatctctttgagtgcaaggccagcctggtctacagagcaagttccaggacagcctccaaagcaatagagagagacacctgtcttgaaaaaaaaaaaaaaaggttgacggttgggttctttctagagaggttaaacttccattcaaaaatcacaaaactccagtgagtatactttggaaaatttgtaatatcattttctaactgaaaatgacaagaaggaggcaggaacgaatcatataatgaacttccaaatacccatcatatagcaaataactattcttagaggtttcctctccaacttatatatcttttcctttctgagacaaagtctcatgaaactcgggctggccatggactttgaaccccttgattctcctgcctccacatttctgctgcctggattatgtgtcataacgtctggcacatgtgatagtgagaaccaaacccaaggcttcgtgcactgcatgaagggtaaacactctaccaattggaccacatctctaaccctacagtgtctttttagctagcagatgacagagacaaggtaagattttaacattaagtcgtttttctgtctctacaagttaagcactttcttatatacttacagtgccaatttagtcacatcaaaatacacacatcaccttttaagtttggggttaggctgttgttgcaagcattacagtccctgacagccaggagccaaggaataccacaaagtcacaacacacaacaaacctcacacaagagatttattgggactagggaggcagaggcaggtggatctctgagagttcaagaccagtctggtctacagcgtgagtgccaggataggctccaaagctatacagagaaaccctgtctcagagagagagagagagagagagagagagagagagagagagagagagagagagagagagagagatttattggaagggaacaaaaacaggagagtggctgcctctgctctgttgagaaacagcagcaaattgaacaggatacagggcttatgaagagcttcttgggaaggggatggaactttccagagtggagatttcacctccagagattgggctttttactctgtagagtgggacagggtccagcagttaagattattctgtgggtggaacctggcagttataggtcctcaggggagaggcctggccactcgtgtggctcaaggggcttacggtttgggggttgttttgttgtgttgttgactctgtttttctttaaaataaatcttgttttgtagcccagggtgacctcaaactgccatcctccagcctcaccctcctcagtgctaggagttaagtgagcaccatagcaccaacttaatcatgaattcacactctgtttccacctagaaaattatcagaagaagacacaaaggttgtctgcagacggccacccctgactcccttctcactactgtgtagctgaagcactaagtcaagcagatcttaaccatgatgtccatgaccctccactgtggagcctaagccctagatttctaccactaacaactgctaatgagccatgaaagaaatctactgacctgcctgggtctagtttcctgtttgtgaaaagcagcagcaactataaacgagacaagggcattctaagaaaacacgcacaggtctcatactgctactcagcagctgcatggcacggggcacactggctattttctgcctctgaggagtgaagatcctcaacttatgtgaagatcaaaaaatatgtaacacacacagtcttcagacaacggccatatgcggtagattgctcagtgaacatgactggtagagaacactccatggactgtagaaaatgaaagagactgaaaacttgaggaactggactagatgatctcttgagttagaaatttattgttcaaccagaaaaacaagttaaggttccgggtctgttgatgactcatactatgattcatattaaaaaaaaataaagtaaggaaaaaggaatatgaattttacagttcacacacttaagcaatatgaaccatttcatatctatcccacgcaaatgacttccagtgtccatgctgggtcatgttatattaacgtgtgaagtgcctgcagttgtgctggaccaacccacattataatttcaggagacagtacccactgtactaactagatttgttttctttcttcagtaaaacaataaatcaacacagcctgtgcagggccccacctccagcctcccagacagttcccgggaatctttctccatcttcttccctctttctctcttttccttccttttttttctctagcctttctcacnnnnnnnnnnnnnnnnnnnnnnnnnnnnnnnnnnnnnnnnnnnnnnnnnnnnnnnnnnnnnnnnnnnnnnnnnnnnnnnnnnnnnnnnnnnnnnnnnnnnttctcttcctgacaatttccctgcctttatcatctccatatcttttaaacaaagaccagattttaacaacaatgttggtagaacatagttttgagtttcccagctgcaaacctttgacagggtatctgcatttgaattttctgtttactttaagctgtgtgtttggatatatcatctcccttgtcaaacatatagtttccctcaataaaatctatatagaagctgccttcatggtggatatatcatctcccttgtcaaacatatagtttccctcaataaaatctatatagaagctttttcttttgttctcattttcttttttttctttttctttttttttttttagctgaggactgaaccagggccttgcacttgctagggcaagaattctgtcactgaactaaattcccaactcaacttgaccattttgaagtttgtgtttcagctgagccacgtgtttcatctcaaagtcaccatgaactgtaagaagagcagatcacagaagattccattcaatgccaggaaaaacacaaaaatcaatgactatttctctctggtatgtctacaaatattgcttgtgggatatactagtagctgtcttaactaccatgggccacataggattgactgccaagaaaatgcctcattgttgattgggacagtgacatactctagtgacatttctcacctactacatttattttggtgaatggcagcgaagatgaggaattgtaatcagcttttagctatatcaaagcagtgtttaataaaaagtattgcaattatatctgaaacattaataaaatagattaaatgtagtatgtcatatcaacatgtggaacaaacaaaatggatctctttaagtgatcaaatattatatatcatagcaacctgtgaaacaaaattaataatatttaatagcactaaattcaatcataacagtctatatttgcttggtactttacagtttacaaaggattttgtatatttattcttaccacaaacttcataggcaattgaggaaggttggtcccaattggtttatggagacaaaagagagaatagagtcccttgagcatgtgatgacgacttgggcaagtttgctgagatatttggagccttctcctctcagcctctgacgtgacaaacagttgtgtcatctgagactaaactgtgcctttattatatcaagatagttgagaagcatcaggcatttgatgtacaaagtcaaagcctttttcttgtatctttgtgtgccagttctagaaagccaggtatctaaatagctagaaaacccctcacaagcagagatctgtttatttctgtcttcctccataacatcaagctcaaggaacacatatgatccctttccctttcaaactcgccaggccaggcatgatgctgtaatcccagcattccaaaggtagagaatataagattgtgaatttgataccagagtgaactatatgatgcctcaaaaaggaaaagaaaaaatttgacaaaagtccatatctatccagtaatatttaaatatatcaaggtctattacagtactcccattatgaaaaagaagttttgacaaaatctagactgcaggcatttattttgagatatattttgagatatgcagatatatagattgcctggatagagtagatttatattgccttacattcttttcgtctgtttaactgagaatgttagtgtcactacaattgatgagcttggttaattatccaagctccaacattgctactcctattaccagtgagtgactttgatggcatatgaacccattgcctagtggcatctttctcataatatgacttaggaaatgaccctttcagacatagttatcagccactgtcttaatttctttttctactgatgtgacaaaataccctgacaaaagcaacttaaaataggaaagatttatatggctcacagtttcttacagttcaccatggcagggaagtcccagcagtaggaccatgggagagttagttatgttgcattcacagtcaatggtagagagcagtgaatgcatgctcccttcccctagcgtctcaaacagtccgggatttaacccagggaaatgttgccaggtttagactggttctcactgggattgatgtaatcaagataacaccacacagatatgttcagagacccatctcattggtgatttgaggttctgtcaagcacacagttaacaataactgtcacaaacactttttagtttttattgagactttcctatttactgaatttgatttatgtcctctcattttcccctctccttgttcttaactaaagtcccataagaatgggagatgatgaaaatttacaagaaatatatgatccaatacaaaagacaaagggaatagtttccattcatttcttgatagatgctgcctgaatcacggtattaagaaaatatgaaaattatgagtttgaagcaaacctgggctacatactgaattccagggaagtcttaactttatagcaagactctatctcaataaagcactaattattgagcatctgttgctgttgcagaggaactggatttgattcccaacacccacatggtggttcataaatactggtaactccagttcaagggaatctgatgccttcttctgacctctatgagtgccaggcttgtacatggagcacatgcatacatgtaggcaaaatattcgtatatgtaaaataaatacattttaaaaaacaaattaatgataaataaatagcttaataaactgttatttcaatacaccttatgtttggataagataaaatgtatattgctgaaaataataagaatgacttgaagtaccatacagggaagcttgtagacctttgagtatctgaattacacttgtgtctgttctactatttgttaaaaagatgcaccatgtgtaacaagaggagcttttctgactgatgtgataggaagttgaggtagtattttggatcccaagatgaactctagtttaattctacttattgatcttttgaggttggtactgaatttcccacaggaattgtgtgagttggtactaaaaaaggaaatatgaccagagttgtcagttacaaagaatccaccatttatttttaggtgtccaaaggagatcaggaaaattccagtatttctcaagtaaaagtggactctagaaaaatgccaagaggtataaccaacacccaggaccaaagaccactttcatccaagaaagttcgacaagatcagactcctccctcaaataagaaaattttaatcaccttggatgtgaaccacaggaagaacaaaaacatgaaacatgagctcttacatagtgagacaagtagcttatatgaagccctcaaaactctcagtgctgtgaaaaaagagatagatcatcatcagggcaaagaaatgctggtctggggcaaagaaggaatagaagggttcataaaccctgccatgcccctctgctgttttccagaaggcagccacgtgctcattaggttctctcaaagtaaaagtgagccggaagtaaataaacaattgtttgaaccacaggaccaagcatctaccagttatgtccgattttacattcatgcaattgggactaagaggaaaaagattgtgaagtgtggagaacttcacaaaaaggggaacaaactctgtgtctttggtttcaaaggagagaccatcaaggacactctgaggaaggatggcaggtttctttttgcagagagtgaccattggaggctcattggtgaactggacaccatcatagaaaacacccagccagtggatgagttagatggcaagctctttcaggttgaggctgagcaaacaaagaatccgaaggtagtatctgtcactcagaattctgagtttgagaacagaaactcttatgaggtagatgaacgcattgtgaatgagtaccccacattgaaagaacaacgagcaaaactcagagcatacatcaaggaagaaagtgaaaaaagaaagaagaatgcttccttattcaaaatacaccaagaaaactttgggaaactgacaaaaaattctactcctgttaaagtaaacaaacatctttcaagggtcagcgactcagttgggtacctgcagtgggacaataatggaaatgagggctgtgccacctgctttgtttttaaaggattgtacattttcacctgtcggcatgtgataaatgacatcgtgggggaaggcacagcgtcaagtaagtgggcaagcataattagtcaatgtgtacaggtgatctttgattttgaagagttcccaccaagaaaagacaatgcttttagtnnnnnnnnnnnnnnnnnnnnnnnnnnnnnnnnnnnnnnnnnnnnnnnnnnnnnnnnnnnnnnnnnnnnnnnnnnnnnnnnnnnnnnnnnnnnnnnnnnnntgtgtgtgtgtgtgtgtgtgtgtgtgtgtgtgtgtgtgtgttcaattgaccctgggtgttttcctgggtcactttatttattgggacaagaactatcacaaaacctagaagctagatatctctgttagtctggctagccagcttgggccaggtatccccagtctctgccttcagttgaccaggtgactggcaggccatcatgcctttggggctttttcagggattctgcagatctgaactctgatcctcacacttagcactggccttctcaagagcattttttaaaacattttggctttgaagaaagatggctttggagagaagacttgcattaaaaagctcttactactcttgcaaaggaccccagttcaatacccattacccacatggaagctcacaaccatctgtaactccagtttcaggggaccctatggtctattctgacctctgcctagacctccagaccctcatatagcctgttgtcttcccaggagtagaaggaatacatataggaaggttcaaatgctgggacttcaggtctggtggtggctgggagtttagagaccctatcccggttaagaaggctaattttggttgtcaactttgactatatctaggatgaactacagtttagaaatggagggcgcacttgtgatccagatctataggaaggagacaacgtgcctttgatctggatcttgaggctggaagacacaggcttttttatttatttttttcaatctggatcatgagtctggaaggcacacctttaatctggtccgtacctactaccggaagcctatgtaaggacaatggaagaaggaagggtttgttcattcttgcctccttgcccttgccttgccagcacatccactccttcaccagcattggagtctgattctttgggattccagaatatgcaaaagaccagctaagacacccagccttgcaggactgagcaactaatagattcttgaattttccattcacagctagacgttgttggattagttgcactgcagcctgtatatcatttcaataaattctttgtatattaagtcatattataagttctatggctgtagagaaccttgactaatacaccaatcctcttgcaaatgacggcagtttcttcgcagcaaagaaagaggtgagctggttgttaattcaccaggggatagtaaaagatcattcctctgtgcttgaccagcacagagtaggatgtccaggctcttgtctgtaacccatccccagaaggcccctctcaatgttttttgcacatttgctttagttcatgggatgacactttgagttcttatccatcatgctatccttcacctaccaagtccaactcataaatcactgtctctgtgatatcctgcccttatagaggcaaaagtgtttttctgtgtttgcccagaacacacctgcaactttacttaccgaaaatggcttgctctgttggggtagggaagcctctttccgggcctcatgagggagccactactaaaaagcattggtcttactccttaactatcccattatttcatctatttccacctatcccagctatgtgagggactttgccaggttcttttgtttggtttgtggatctgacaacagaaaaatagctcaacattcttcacttggccaaaactattatgggcatgcctagagccaatgagatgcatcatgtcagagaaatgtagaagcatgttccttttcaaggccagcactatctccaggggagattttcttggtaactattttcttggtaacagaagttacttactcttcccatgttgctgagggtttgtttcaaaggcatgagagaacagttatgaaaaggcaaacaaaactgctccagcgctaaaagttgtgacccagctagtccaggctgtccatgagacttagctttacacttcaatgggaaatgaagcctgtttctaaaactatgacatcagactaattttctgagcaatgttccttgatgattaacatgataacagagcggatacatcagatgcttgctgctcaacaagtaaccaaacttcaagacagccagaaaggacatactcactgagtgccaatagaactgaacaaacaagaacaaccaggaggcagaactagaccacacccaagaaaccagaatgggcgggaataagggtgggaattagctccctgtcaacatgtgccttaattttcaccagcctgcagtgcaattctcagtaaatgaccaacatgcttaccgtcatgggtccaagcttctctctttttctagccttttgtttatttttatctgttttctttcctcacatgtccagtccttgtcccaccttggccctccctggacactcactgttcaccattatctactgaaagtgaatctttccacatcagcttttatcttttagatggagctgattaaagcatggacacatgtatgcgtgcatgcatacatacatacatacatacatacatacatacatacatgcatacatactacacacacacacacacacacacacacacacacacacacacacacaccagctctttcctcagactttatgcaacagccaatgaagactttatcactccagttgctcacatcaggaatcaacactgtgctgtcattttctccataaagaaattctgtaggctgtccctttcatttaaatgctaattccaactatggctactaccttgagaaccccaacatctttggagccccaagacagatatctaactatctgcccttttccacatctaccacaaccccagagtttgtagtctacatagccaccagtgatttttaacaatttaactcagtttatattattactcagctccatagtctccctttagaatagatttcacacatttgtgataaaatccagactatgtctatggcccactggatgatttgcacaggtatgtgctaacagtcctgtggcatggttctttccagagaataatttcaaaaacattgtccccccccatatttacttttcatgatccttaaatttttacccatctacaatgaaagatcagcaaggcccctgctgagctgtgattatgtggccagttgcttcagattttaggaataacattcatttaaggaaactattacaattctccccttattttatttttttaacattctattattattattttgacaattctagtttctacagttactctctccaaaccctggagagtgcccagaacttaagctagattgtagcttcactgtgtgttttatgctaaatttggaaacacacacctaatgattccaacaccaccatcaactcttacataaacatgtgtttgtctatgagtgatcaaagtctgatcaccctgtcaccttgaccagctagctacacatattctcctcttctttggccaacatctcaaaagtcaggattctaggtaaggggcattcaccagtcaccccacacccccccatcaatgttccaaacctgtggtcacacagatggctaatgatcaaagaagagttggcataagggacaagattttactaacttactaacatacaccttagggttatgcattccacatacaaattcataatgttgctcacttgggagatttacacagcaaagatattgccagaatcatttcctaaatacaccaatgttgctcttttcaagtagctgttacctaggttcatcttgcccctctcttggaattatacttcttcctaccagagcacaggggacttaaaggcagaccaagatttaaagatggttcgtgactccttgggctgtcccatagaggcttgtcctttcatatggagctggccctaatggcctgttggaagtcaggttgtcttcttttgttatgagaaaggacgctaattggaggtcaatcttggtgaataaacattaacagaaacttttctcagcaaaccaaaacttcaactatggtacagaactttctttcttacagataataacaatcgtggttagtaaactacttaccattcagctgtattttgggtagtcctcctttatctaaattctactttgtatgacttaatatttctaagccagtttattagtaaaacctttatagcatcaattttactacttcagatttctcctgtatccatagaacctttggctgtgagtaatttgtggtcagcacttcctggtcagaggacaatacctatttaccatctcacctgcataagtgataggacacacataaggtgaaaatcagggaaagtactgcccacatatgttcacattgtccatcattagataagagcccacctgtcaaacagcgtaaagacccaccctgttcctctcacccagggacttgattcctccctccacctaaactcatgaaaagaattcagcagatagcctctctgtgttgggggtggtggggtaggggtgctgttaaagacaggatagccagagggagaattgggggagtgatataattctatttcaactaaaacattttcaaaagaaccgttacaggggaaattgttatgtttttgaagaaaaagagaaaaagagaggcagatgagacagtttattattagaggcccggcagactagggagattatgagaaaagtggaacaggggtaatggctgacagccatggctggtcgccatggagaggcagagagagcgcgtaggtgagagccaagaagaaacagagagagagagtagagagtaaaggagagagcagcaggaaagttggaacttttaaagggaagactgtgcatgcgcactgaggttccacgcatgcccagagtcctcacgcaggttgtaatgcgtagcgggtgacgtagtgatgacatagcatgatttcctgttcatgccctgactattgtcagggggcagggtctgtctcttaaagaggtagagcctatcagcattaaaccctgaacctttcagaaattatatcataatctcaaaagaataagaggacttttttttaattttcagaaaaacaaacagaacatagggttcttgagctccttgtttgccacaaccttctccagtcctgtggagtgtattgctggcttttactctcattattaatattataaatttatacttttactacttctgcacctgtgtcttgttcaatcctttgcttaagacaaagaacctggacatcccttcacaggacacaggaaaacaacaccctggtaccaagaatggcactatctggaggtagcgaaatggtgcctttgagaggtgggcctttgtgagtggtccttaggcctttgcaggtgttccctcgaggagaattgtgggaccctgagctataatgtaaatgattttattcctgcagtgagggagctgcaccccagcaatcaacagggctgctggaccatgcactggaaactcaaaaacnnnnnnnnnnnnnnnnnnnnnnnnnnnnnnnnnnnnnnnnnnnnnnnnnnnnnnnnnnnnnnnnnnnnnnnnnnnnnnnnnnnnnnnnnnnnnnnnnnnngtgacacgtcccaggcggcggctgccagcctttattaggggacgggattcttggctcagtgtctccgctctggtaagcttatgctctcctctcaagacgcattaaagctttcctgcagaaggatccgagtgtcccgtgtatgatttcttgctggcgagaaatacagagcgcgcgggacatatggtgccgaaacccgggacagtgagctagttgttaattcaccaggggatagtaaaagatcattactctgtgcttgaccagaacagagtaggacgtccaggctcttgtctgtaacccatccccagaaggcccctctcaatgttttttgcacatttgctttagttcatgggatgacactttgagttcttatccatcatgctatccttcacctaccaagaccaactcataaatcactgtctctgtgatatcctgctcttatagaggcaaaagtgtttttctctgtttgcccagaacacacctgcaactttacttaccgaaaatggcttgctctgttggggtagggaagcctctttccaggcctcatgagggagccactactaaaaagcattggtcttaccccttaactatcccattatttcattatttccacctatcccagctatgtgagggactttgccaggttcttttgtttggtttgtggatttgacaacagaataatagctcaacattcttcacttggccaaaactattatgggcatgcctagagccaatgagatgcatcatgtcagagaaatgtagaagcatgttccttttcaaggccagcactatctccaggggaggttttcttggtaactatttattctctgttacttactcttcccatgttgctgagggtttgtttcaaaggcatgagagaacagttatgaaaaggcaaacaaagctgctccagcgctaaaagttgtgacccagctagtccaggctgtccatgagacttagctttacacttcaattggaaatgaagcctgtttctaaaactatgacatcagactaattttctgagcaatgttccttgatgattaacatgataacagaacggatgcatcagatgcttgctgctcaacaagtaaccaaacttcaagacagccagaaagcacatactcactgagtgccaatagaactgaacaaacaagaacaaccaggaggcagaactagaccacacccaagaaaccagaatgggtggcaataaggatgggaattagctccctgtcaacatgtgccttaattttcaccagcctgcaatgcaattctcagtaaatgaccaacatgcttaccgtcatgggtccaagcttctctcttttgctagccttttgtttattgttatctgttttctttcctcacatgtccagtccttgtcccaccttggccctccctgaacactcactgttcaccattatctactgaaagtgaatctttccacatcagcttttatcttttagatggagctgattaaagcatggacacatgtatgtatgcatgcatacatacatacatacatacatacatacatacatacatacatatatactacacacacacacacacacacacaccagctccttcctcagactttatgcaacagccaatgaagactttatcactccagttgctcacatcaggaatcaacactgtgctgtcattttctccataaagaaattctgtaggctgtccctttcatttaaatgctaattccaactatggctactaccttgagaaccccaacatctttggagccccaagacagatatctaactatctgcccttttccacatctaccacaaccccagagtttgtagtctacatagccaccagtgatttttaacaatataactcagtttatattattactcagctccatagtctccctttagaatagatttcacacatttgtgataaaatccagactatgtctgtggcccactggatgatttgcacaggtatgtgctaacagtcctgtccatggttctttccagaaaatttcaaaaacattgtctctccctaccatatttacttttcatgatccttaaatttttacccatctacaatgaaagatcagcaaggtccctgctgagctgtgattatgtggccagttgcttcagattttaggaataacatttaaagaaactattacaattctccccttattttattttttaaacattctattattattattttgacaattctagtttctacagttactctctccaaaccctggagagtgcccagaacttaggctagattgtagcttcactgtgtgttttatgctaaatttggaaacacacacctagtgattccaacaccaccatcaactcttacataaacatgtgtttgtctatgagtgatcaaagtctgatcaccctgtcaccttgaccagccagctacacatattctcctcttctttggccaacatctcaaaagtcaggattctaggtaaggggcattcaccagtcaccccacacacccccatcaatgttccaaacctgtggtcacacagatggctaatgatcaaagaagagctggcataaggtacagattttactaacttactaacatacaccttagggttatgcattccacatacaaattcataatgttgctcacttgggagatttacacagcaaagatattgccagaatcatttcctaaatacaccaatgttgctcttttcaagtagctgttacctaggttcatcttgcccctctcttggaattatacttcttcccaccagagcacaggggacttaaaggcagaccaagatttaaagatggttcgtgactccttgggctgtcccatagaggcttgtcctttcatatggagctggccctaatggcctgttggaagtcaggttgtcttcttttgttatgagaaaggacgctaattggaggtcaatcttggtgaataaacattaacagaaacttttctcagcaaaccaaaacttcaactatggtacagaactttctttcttacagataataacaatcgtggttagtaaactacttaccattcagctgtattttgggtagtcctcctttatctaaattctactttgtatgacttaatatttctaagccagtttattagtaaaacctttttagcatcaattttaccacttcagatttctcctgtatccatagaacctttggctgtgagtaatttgtggtcagcacttcccggtcagaggacaatacctatttaccatctcacctgcataagtgataggacacacataaggtgaaaatcagggaaagtactgcccacatatgttcacattgtccatcattagataagagcccacctgtcaaacagcgtaaagacccaccctgttcctctcacccagggacttgattcctccctccacctaaactcatgaaaagaattcagcagatagcctctctgtgttgggggtggtggagtaggggtgctgttaaagacaggatagccagagggagaattgggggagtgatataattctatttcaactaaaacattttcaaaagaaccgttacaggggaaattgttatgtttttgaagaaaaagagaaaaagagaggcagatgagatagttttttattagagggccggcagagtagggagattatgagaaagtggaacaggggtaatggctgacagccatggccggtcgccatggagaggcagagagagcgcgtaggtgagagccaagaagaaacagagagagagagtagagagtaaaggagagagcaacaggaaagttggaacttttaaagggaagactgtgcatgcgcactgaggttccacgcatgcccagagtcctcacgcaggttgtaatgcgtagcgggtgacgtagtgatgacatagcatgatttcctgttcatggcctgactattgtcagggggcagggtctgtctcttaaagaggtagagcctatcagcattaaaccctgaacctttcagaaattatatcataatctcaaaaaaataagaggacttttttttaattttcagaaaaacaaacagaacatagggttcttgagctccttgtttgccacaaccttctccagtcctgtggagtgtattgctggcttttactctcattattaatattataaatttatacttttactacttctgcacctgtgtcttgttcaatcctttgcttaagacaaagaacctggacatcccttcacaggacacaggaaaacaacaccctggtaccaaggatggcactatctggaggtagcgaaatggtgcctttgagaggtgggcctttgtgagtggtccttaggcctttgcaggtgttccctcgaggagaattgtgggaccctgagctataatgtaaatgattttattcctgcagtgagggagctgcaccccagcaatcaacagggctgctggaccatgcactggaaactcaaaaacnnnnnnnnnnnnnnnnnnnnnnnnnnnnnnnnnnnnnnnnnnnnnnnnnnnnnnnnnnnnnnnnnnnnnnnnnnnnnnnnnnnnnnnnnnnnnnnnnnnntcatgtcactggatatagaaaagcatttggcaagactaaacactagttcacaagcactctcggcaaagtagaaatagaagttaattttttaggttgataaagagcttaaaaaactctacatctattgtgataattaatggtagggaacctaaatgccttcctgttgagatcaaaacaaggcagtaatgtttacttccaccactccaatttaatgtcatactagaagtcctagctggtgtaatacaagagaaagaaacaaataacacatggattaaaaaggatcttttgcagaattcatggttgtttatgtagctttttgaaaaagtcctaaatagtaaataacagtcacaaaaatatcccttggactaacgattaatgatttagttcattcttgctggtataacaaagtactttaggctggtgtacttttaaactggtctttggttttaatgtgtatgggattggagttgcatttgtgagcagcagccttgtggattctgagaattgaacctgggtcctctaaagagcagacatctctcctgtcctggtatgcattatgttcaaatagtagaaaccttgttacttacagctgtgaaggctaagaaatccaaggtctaaggactgatttttgtctctggtgaatcctcaatgcttccaagatgattcctttgaacaaaagggccagaccatttggggagcactaaagtcattcatgacagctcagcctattacattgagtcttaggtaccaacatattagttctggagagatacagacattcagcacacagtggaaattagagtaattatagagttaacaggtaacaaaacatttatttcttacttaccagcaatgaataatgggaatttgattttaaaacaatgttgtttactctaaattagtcatatttacaataccccaatatggcttatcaatacagtttgtgaatcatgagtatatactatggataggtgggcgaacacataaatcaatggaatgggatagagtaaccggtaaaaggttcacaggaatatgtccagttgacttgataaagaaatttgactaaagaaattcagaggaaacttttcagtaaatcacactggagcataagtcctcaaagccacgacagaagaagaagggagggggatctttttcatttaattaatttaaaatgtatcattgatctacataaaaattgtaaaatcataaaccttgtgagagaaaaagggaaaggcatcaagtctaagagacagccaaacaattcttatggaaaatggaaggcagaaagttgcaaaaaaacaaaaacaaaaacaaccccccccaacaaaccaaacttatgaaggatgttgtgaagttacagcttgacagaagatattttcaagccatttatccaaagatttttattgggaatatttttaaagttctcagacttcagttttaaaagtagccaaacatatgagcaaacattttgcaaagaagatatgaagatggaactcatcacctaggaaaatgttaaacatcactatcttcaacacatgatatgtgcatatgtgcgcatgaaaagcacaagaaattatcatcacaccactattaggaacactaaaataaagtatactggcaacagtgttcacaagatgtcagtggcaatggagcttgccactcaagccagagtctgcatgatggaaaaagagaaccgactttacgaagttgttctcccatctccacacaccccatggtgtgtgcctcctcatagtgataataatatgacaatatataaaatgtcaagttttactcacgagaaggtagagactagatgttgagtacattgctaagtgaaagggaaaaatggcacaaccacactggaaaactgacccaatcagtagctgggaaggtcccagggtagaagctgccatggctatttcctaaacaatcttgtggtcaaaattccttctaagtattcatgtttatgcccctagacctaggtagaagcttttgtttgtttaagtgggtattaatcaatgtagagacacatgcttggtcaacgtgttgagaataaatggagttctcagtcttaaatgggacatctttatcgacacccctatcaagttctggagagtaacgtagagatatgagattacatgtaatattttggagattctgtgggacagttgcaaatgaagtaactccataccgggtactaagctttttgtttgatagataatagtgttcgggggtgggggaggggggtagctccctttaaaccacctttataaacgtacacatattatacaaaatccgggtggatacagaaaatggggtctatttctttgtttcatattttttcaagcagctagtacaactcagactcttcagattctacatagaataaaatgtatgccataaaagcatgcatcccttggcattggctctccatggttccaagtgtgtggcttttgacttgcacgtgaggactctgaccagcaggaggcgtagaagctctagggcgctggtgcaagggacgagggggcgtggcttctgcatccttgatggacagctaaggaaggattgcatgcgaggatgaggcaatagcgggcggaatgaggagtgctaaaggctgtgcgtgcgtgtgcgcgagtgtgggtgttccagtgcgtgagcgagacgagagcttcgaagcaggcgctgctgactagaccggctcacaacagacagacgctgcaaaagtgtgacgctgccggggaggggcgactccttctggaagccactgagcagagccgcaggcagggggagctgtgtcgccgcggtcgccgcgctcagtacggggagagagagggcggagggcgtgaccgtgcggtgcgatccacgcggacgcccgcggagcccgaggcgcaactggtgcgaggcggctgcagcgtcgctcgggcgggccgcgcgcccccgggtggctttgcaaggcgggacggcgagtgcgcggggctgggcctttgcatgaagccgctggacccttcggagcagcagcggcagcagcggcggagcccggcggcgcgcgatcggaggcgggcggccccggggtccgcgtcccggtgcctgcgcggctgcggactcccccatgggcagcagctgaggctgcccgcggcggcggcggcggcggcggcggcggtggcggcggtggcggcggggcgcggggcagggggcgcggtccaggcccggaggcggcggcgccggaggaagcgcaggaggcccggcccgggaggcgggcagtgctgcgccacagccccgggctcgccatgctcctggcctcggccgtggtggtgtgggaatggctgaacgagcacggccgctggcgtccctacagcccggccgtgagccaccacatcgaggcggtggtgcgcgcgggtccccgcgccgggggcagcgtggtactgggtcaggtggacagccggctcgcaccctacatcatcgacctgcagtccatgaaccagttccgtcaagacacgggtgagcagcccacatcccttgtgtctcccgggtgctaccgccctcgtgctcgtgggttgtgggcagtttgtcttactggggtcagcgatcggtgttgagggcaggtgcctccttccttaggtcccctcagggtcccatgatcacctccaaataaatgtccttcctagtatttgaaagtgtcttgattatgcaaannnnnnnnnnnnnnnnnnnnnnnnnnnnnnnnnnnnnnnnnnnnnnnnnnnnnnnnnnnnnnnnnnnnnnnnnnnnnnnnnnnnnnnnnnnnnnnnnnnnggaatggtgtggaagtcattgagcagggaaggtacaatgtgccatacaatatgggcacctgggtaatcctggaaatgagttatggagagcaaacactcgaagagactgtttctacttcatggtatttaccatggattgggccaggaggacactacatagactagaacgtttctcagcagttgacactcaagccttattctcttaaagagaaaagaagtcatggtcaggaaacaatctcacaactgttaaaatcaaggagaacttatgcactgaagacagccagaggtcttagatcatctgagggaagggggaggagtgggtgagatggtttgggaagattgctaagagactggattccagtattgcatcggtcttttcacaagtccccttattttcaacatatcccctagtgctattgtgtgatgttgtgtttcccctgctctgtgtatctttccaaaaggcaacaaagggggaaccaaaatttaaaaagtgtggtatctacagtgagttatgaaattttagatgcaataggagtaaaggttatttgtatggtattcccattggtttgttccaaatgcacattctcaatgttataaactaataaaggtggtttccatagctgtctgtctttagctatgcacttcttaactcttaccagccacaagtacctcattattttcaggttctcttgggggtagggtcactgcaggtatcaccactgacagggaaaatcaatctccaagatgttagaatgaaaactgggtgcagctggacttcgtcagtcatatgggattgaaacttccagagaatctgacccaatgattttatttccttacacatttaaacacagtagagttttggggataaacttccatgtgacagttctcataacaaagcttcagagatggttatataaaaattcccttataaagcaccctgtttatgttttttttattatttttgagacagggtttctctgtgtagctttggagcctatccaggcactctgaagaccaggctggcctcgaactcacagagatccacctgcctctgcctccccagagctgggattaaaggcgtgcgccaccaacgcccggctatattttgtagtatctgagacctttatcctaagaatgggttccattgactgggaaacagtgctcagggctaagacctggaaaggaagaatattttataagctctaggatagattctactgatggaggatgcaaagtacgtggtgtctctttcaggaggatgcgttctattcactgagagacaaagcccacgattaggtcctaaacaagtctcagctgggggcttctaatggcatagtaaaggattaccaggttgtctgaccactttcactccagcattccaggtgaccaggcatcaatgattttgttgaagaaaataggcccggagtgattgacaatcttggtttcttcaatgcttactctaagccatgcttagagtaatccaaataaggattccatatttgctccctaaaattaattgggaaacatctcagatcaagtccttatttgcacataggattgagtgaattgcctgctacactcattcccatctgagatgaaacaaggccacactctaacttctcagctttccatctatgacatttctttagatttatttattttatgtgtatgggtgttttatcttcatgtatacctgcacactaggtacacacctggtgcctgaggaagccagaaaagttcatcagatcctctgaaattgaagttataattgaaggactgtgagctgccatgggggtggggtggggggggcaggaggttgctgggaattaaaacccaggtcctctggaagaaatattcaactctggaaccaacttcccagcccatcaacttgtaatttataaaccactgttctttccattacacactcagcactgtacattccagaacctgagaggattccctgggatctggatgcaaagtctgctaaccaagaaagaaatacagatagggaaggaaggggatcaaaagtctctgttagtacatctgactactggagggagggtgaagctagtgacccacatgcttctttgatgggggaggtccttctgtgtatgtttatcttctctattggctgttgaataaagcactgtttggccaatgaggcagcaagttaggtgggactaggagtcaaggaggattctgggaaatgtagtaaaagaaagtcttgtgatccaggaaggaagtgacatagcaggcaaactcatttaagcaagggcaagaaggaagtcctttcccttttctcttcttcctgctctctgctctggagttaccatgtgatccgcccgcaagagagg

SEQ ID NO: 17 - DNA, 42843 bp, Cricetulus griseus
  >scaffold_10 dna:scaffold scaffold:CHOK1GS_HDv1:scaffold_10:48106631:48149473:1
  misc_feature 5688..5787: /note="n is unknown"
  misc_feature 13130..13229: /note="n is unknown"
aaaatgaaataaaaccacaggcttggctgatagaaaactgtataatgttaagcaatgatgggggaaagcgggtcttaaagcagactagactttggaccaaacccagccaatgtttctcatccgtgtttattttgttacttgacatgattcaactcattaaggatttcaaaggtccaagggaaagtacttttgctttgccaaggcatccttagttagaattccattatctcccatgatccgagacagggatttcctcctactcagttctgagtaattatgtgtaagcaaacccttggtgttctcctgcagtgactgtatggagctgatggttcaccatgaatcattcatgtggtagagtcttcaatgagagggtatgggagactgacgttgatttgcagtgtttagatgaagaatgactttcccattcttttcatttgcttcatcagacttgatgcttatccctgtaaaccataccctctcctaaaatgattacaagaaaggaagagaaacaagcatattcaattaagccttcctgccctagcaagtctaatttagaatgtgccttaggaaatactgcttctttacaaaaatagggaatggctgctcttgatggatggctctccctcttcccgctccctctccccacttgtagctcctgttttcttcccaaccttcctctttcctccccatctcctccccttccacttacatcctgtgtctctacctctctcctttttgtctttgacttctgccctaactagagagacaaaatgacttgttagaaaacaacagtccctaccaatatttgcgacctgctggttgctcctttcatattaaaggttagacctgaggggtaacttttgttacttccaccttgctttctccccagtcactgcctgatttagctaagttccaaggcctttttagtacagatctgatgttttcccatctgtcctaataatttaagaagcagcaagccaacacctccatctcacttcaagccaaaggcaagtgcaggggataacatctgaatgactttgtcttgtctcagttcctccttcacacaagcaagttatttctgagccaatagctcagtctctgctgtcttattgcccacaccaaaggccattcaactactgttgtagcctgcatacaatcacatctcatatgtgctgctttcagaaactggatttatcatccagtttttcagccattctatggttatcttttttttttcatttttaaatttaaattacaaacaagattgttttacatgtcaatcccagttccctctccctcccctcctcccctgccccctactaacaccctacctatccctaccatttctgctccccggggagggtgagttcttctatggggggtcatcagagtctgacatatcctttgagatagtacctaggccctcccagtttgtctatggtaagggagtatccctctatgtagtagtggctcccagtgtccattgtatgctagggatgagtactgatttactacaagagaccccatagatttctgaggcctcctcactgacacccacattcatggggtctggatcagttctatgctggtttcccagccatcagtctggggaccatgttctcccccttgttcaggtcagctgtttctgtgggtttcaccagcctggtcttgacccctttgctcattgctcctccctctctgcaactggattccagttcagttcagtgttcagctctgatgtctgcttctacttccatcagctgatggatgaaggctctacagtggcatataagttagtcatcaatctcattatcaggagagggcattgaaggtagcctctccattattgcttagattgttagttggtgccatccttggagatctctggacagttccctagtgcttgatttctctttaaacctataatggatccctctattatgctatctcttattttgctctcctctattcttcccccagctcaacccttctgctccctcatgtcctcctccccccttctcatctccccttctcattctcctagctccctccccctcttcccatgctcccaatttgctaaggggatcatatccctttccccttctccaggggactgtgtatgtctctcttagggtcttccttttttcctagattctctggtggtgtggattgtaggctggtaatcctttgctctatgtctaaaatccatatatgagtgagtacataccatgtttgtctttttgtggctgggttacctcattcagaatggtttcttctagttccatccattttcctgcgaatttcaagattccattgttttggttttttttttcccactgagtagtactccattgtgtaaatgtaccacattttctctatccattcttcagtgaggggcatctgggctgcttccagtttctgactattacaaataatgctgctatgaacattgttgaacagatgtccttgttatatgaatgtgcttcttttggatgtaggcctaagagtagagtagctggatcttgtggtagacttatccccattttcctgaggaatctccatgctgtcaaggggatacaaattggaaaggaagaagtcaaacatgttttccgatgatatgatagtttatataagtgacccaaaaaaaaactctaccagagaactcctacagctgataaacaccttcagcaaagtggcaagatagaagattaactcaaaaagctcggtagccctactgtatacagatggtaaatgggctgagaaagaaattagagaaacatcaccctttacaattgccacaaacaacatgaaatatcttggggtaacactaaccaaataagcaaaagacctgtatagcaagaactttgagtctttaaagaaataaagaagatgtcagaaaatggaaagatctcccatgctattggctaggcagggtcaacatagtaacaatggcaatctcgacaaaagcaatctacagattcaatgcaatccccatcaaaataccgacacaattcttcacagaccttgagagaacaatacccacctatacatggagaaataaaagacccaggataaccaaaataaccctgtacaataaaggatcttctggaggcatcaccatccctgacttcaagctctattatagagctatagtcctgaaaataggttgatattgacacaaaaatagacaggtagaccaatggaatcgaattgaaaaccctgatattaacctacccacctatgaacacctgatttttgacaaagaagctaaagttatacaatagaataaagaaaccatcttcaacaaatgctgctgccattctatggatatctcttcactcaccttgatcagatctctcagtctccagaactgtaatgaagtatttccattgttcaactcacctagtcacctttgtttgttatatcagctaattaaaatacttcaatagttcccactgaatcaaagccaacgatattctagaatatccaatgttgatattttttctactgttgtttgatatctctcctgtcatctactacgtttcgggcatctgtcttccttctcttcgaacatcctctactttttcttctgaagggctatacacatgatgtctgtgttgcttggcgtgacttcctatgaacttcctcaaagtcacacagtgttcatttttccagtgataaccgaaatgagtccatgtcagaggtgccatcagatgcaaagcaccttctagctattttccatctcattaatcaatgttttgtctctttctgagcttaccatgtttagttatttgttttctatttctcccccccaccactctttaccagagcagtggattcctgaggaaacagatccttttctccagcacttagaacaggacttggcaaataaacacttcttgaatgaatgaatgaatagatggatgaatgaatgaatggaggaatggatggatggatggaaacaaaagtgagaattgttggaattaagagaatgcaatgagaaaactaacagcacattttcagaagaaattgcagggggagagtagagggaaagggttagatggaagaagattctgctgtaggttttagtaggtttgggccacgtaccttttgcaaatgctctgtcatttgcaatggagtttcggagctacccagggatactctgaagcatctcaacctctcgtcactgtttgggaatacggagttggtgaatttctagaccttggcttgtgccagctttcttttgcagtagagcacatgtcctttggcttccctctgtgacacacacctttgagccttcttcactgcgtcaaactctttcttgagatgcgcagaatctggagagcctcgttggtgctgtgttagcctcctgatggtgagattagataaaactgtgcaggagttttatcaccaagcaaaaagtttgtcttaggcatttgtcctcttgaatggtgtagatgacaggacccatgttcagcactggcaggggtgtgtgaggagggcacaggttccaagccagtgtggccttcacagtgtgacttgtttaaaaaaacaaacaaacaacaaattaaaagaataaacaaaaagaatctacaatagcctttcagggaaccacttcaaatgcatggacattgtcagggcttaatttagtcacacttaaaagagcattatttaaatttttcagaattcacatttgcctatagtttccagacagaaaataaattattgtccaactctgtggatacagggctttaaaatcggcccatgtgccgagtaaatgtttttctgctggattagtgcaaaggataaggaaatgtgttggagcagttgctctggtgcacattaaatacacagcctgtgggaaccaggaagccatccaacctcggcctgcgatgttgtcctgaaatagtgacacactttccaaggctcctgtggaaagttcaccttagtaagtttttttacctgaaaagaaagaattattttatttgaattatcaaaaaattgaaatcatcatgctatgagaaatctgccaagtggaaggtctgtgaaccgaaactctaaccatctttatccagaacctttggaatgtgcagaactgtgcaacctggagcctgtccacagaaggaacacatgtgtgtaactgtgacatcctgtccacaggaggaacacatgtgtgtaactgtgtgcatcctgtccacaggaggaacacatgtgtgtaactgtgtgcatcctgtccacaggaggaacacatgtgtgtaactgtgacatcctgtccacaggaggaacacatgtgtgtaactgtgacatcctgtccacaggaggaacacatgtgtgtaactgtgacatcctgtccacaggaggaacacatgtgtgtaactgtgacatcctgtccacaggaggaacacatgtgtgtaactgtgcaacctggagcctgtccactggaggaacacatgtgtgtaactgtgtgcatcctgtccacaggaagaatacgtgtgtgtgactgtgtgcatcctgtccacaggaggaacacgtgtgtgtgactgtgtgcatcctgtccacaggaggaacacgtgtgtgtgactgtgtgcatcctgtccacaggaggaacacgtgtgtgtgactgtgtgcatcctgtccacaggaggaacacgtgtgtgtgactgtgtgcatcctgtccacaggaggaannnnnnnnnnnnnnnnnnnnnnnnnnnnnnnnnnnnnnnnnnnnnnnnnnnnnnnnnnnnnnnnnnnnnnnnnnnnnnnnnnnnnnnnnnnnnnnnnnnncatcctgtccacaggaggaacacgtgtgtgtgactgtgtcatcctgtccacaggaggaacacgtgtgtgtgactgtgacatcctgtccacaggaggaacacgtgtgtgtgactgtgacatcctgtccacaggaggaacacgtgtgtgtgactgtgacatcctgtccacaggaggaacacgtgtgtgtgactgtgtcatcctgtccacaggaggaacacgtgtgtgtgactgtgtcatcctgtccacaggaggaacacgtgtgtgtgactgtgtcatcctgtccacaggaggaacacgtgtgtgtgactgtgtcatcctgtccacaggaggaacacgtgtgtgtgactgtgtcatcctgtccacaggaggaacacatgtgtgtgactgtgtcatcctgtccacaggaggaacacatgtgtgtaactgtgtatcatttttccgttttggctgaagtctttctaacaggctcgggctgttctgtctggtgacacgagcttaactgctattaagatttcctgtctgtccttttcttgtgtttgtgaggtgtgggctgctgtgagtcactgtaccgaggaaaaggactcagttgagagaaaagtggcttttaaatgatcttttagcattctgcctgttggaatcatgaaagcagtcccaccgcatgagaccgacaagcctgcctgcagctgctggaggggagcaaagagcgatggtgttggttactggaaactggtgtttgccctggacgctcctagtgtctgaattaggtgacggagggacaagtgaatctgaacttggtgaaacactttacagatgctaagtcttgttcttctactcaaggccattttatctgtattataagaagactgttagaatttttataatgcattaagagaatttcactttaagttctgtaaatattctagaatagtattcagccgcttcaggagaagtccccccaactaatcccttaacaccattgaagacttccatctgttatatcccacatttaattattttcaaaagtagtttacgtatagatcttgctagacaagcacactttactattctttccttgtgtgaatagaactgtctgtaataaaatagtttttttttttttcccccttcagagtcaaacaggcagagatgagtccatctgacttaccaaatagatttcacttcaaggttacattggccagggtgcattaattcagattagctccgagtttggaaaatgactcaactccaggtaaatgaaacatccttcctaatatcaagtgagctgagctttgaaaggcctgcctctctaactccccccaccccctccttgccagattgcctgacagtgagctgtgctcagggatggccaccagggatagcggcagccagctcattagcttgcaggaagcgcttccagctcctcagcatcacgcttctctccacatctccgcggagggtgcactcgaggtttgagcgtggggtggaaatggaggcgtttccgtgctattttggtttattctactgactggctgctcagctgttcgtgagtcaccctaacctcaaaatctgtcattagaacagaataatgacacctattttctgagcctgcctgaatcgcatgaagcattattcatatttctgaaatccatgtgagaattagtcaaggttatatttaggaaaaatttaatgccattgcaattaacttaggattcgtgtttattctttagactttgagaattcgctgtactgagaagttaagaatgaaaagagaacttaggatgaaatttgatttgtttgtttgacaagatggttcaagaagacatataaatatacaaatatgtatttaatatcttagaacttgctcgctcttttctcaaaagatacaacaccgcattttcttctcatgacactcaattctgaaaggacagtcagagaaggagcagccagttttctttagttccagtttttgttctgctctccgagacatgtaaccatattcccaggttaacacagcgagacctctgtgagctatgacgcagccatgaggtcagaagctgccttcggactttggaatatgacagtcaagggagattcagtaaggtgagctttgagcgggattgagttagagggtgctggaatattccaggcctctgcagcgcctgaaaattcctgggccatcatccttttgcttttaggataggtttcactgtatatcccttgaattgagggcaatcctcctgccccagcttcagaacttatttattcaaatattcacttaatgacaaggtcttgagtaaccttgtgctgatttggacactcgatgccactgtgatagaaaacacttgccaaaggagaccggccacctattagaaagaagacgctatggaatatgggaacagtgcaactatcttgacatttaggagcttttcattcagatgtcactcatggatggttcctaaggcagccattagcttaatgaggaaaaagtttacctttaacttgaatatgtttgtttttctacagcatgtcttatcttagttgatctttttcatttgtgggcttagtttattgtggtttctatgcatttatatttagaaaggaaatcattagagggtatggaaactgttttgtctgcagttgatatgtttatttacaaattgaggcagttggtattatataaaactactctaggtattaggtgatcatatacaaatgtctaaataataacccatctatcatttaacattttaatttcagtatccagcttccttacatccagcttgtatgtatagcatgcataaatagaatatttgtatatattttttaccatattgagtttcttatacagattgttgcatattggacctttctattagaagtattttacaggggctgcttctttcttcctgctccactattcatggtttctgtcacattaagctgtctttattactgcttctcacaagtacacttcttcagtcagaaacatctttgtgacaagcccttacaaatgacaaaaaatgaaagacaaccaaatacctgcatttctgttttcacatccaaggcccaagagagattttcaagaactggccttcccctgcctagacagggctcagattatcagctcctcccatgcccacactagaagacacagaagtatagccctgaactctgctcagcaccatcccagctctgtcactagagtccccagctcatagccctggtccatgatttggatgtgaaaatgtatcccaggcctgtttcccttagcaggctgcttagtcactggcctccatctcgtaaccttgtcacatggagcaacaatcttttctctaggggctatattttgtcttccaaagatgcattcagagaaaagtagaattctgactactattatcacaaatattcatctttttaaggagaaataaacaaaagtgaatttttattctaactagattatgtgtacttatatgcaaaattgcttttgatttatgtcatgctgtcagctaaaatctagaaggcatgccatctcaatcttaaacacatttagtagaatattttgcttcctttagaaaagtggttcatgatgataatttatgcaaaatccacatatacattttgatgctttgtttcatccctcaaagtaagatgatgataaatagtttagatgtgtgtgtagaaattgatataaattagattttttaaaaaaatataacttcaggtgactattgactctttctaattcagatgattttcatactcttctgacattttttcttgttatggcttctttgttctcatcagatgaaatgattcttgctaaaagcatcaacaccaccaaccccctaacgtatcatttttcaactctccattttaaatctcatcaagaggttaaaccaaattatagaggatggaaacaacccttttgtaattggaagaaaataaaggaacactattttagcagctcagattaatcaggatcaaattaaccttacatagttttgtcctgacataacatctaggcttctgacctatgccatgaccaagtgtcctccttcattgctggtcactggacactggatatgtttagccatccttgagtgtttccctggataaactactcactcactcctttatctccagatccttctcctatccctttaaacattgctgtcctagtaactcactcttcattaggccaatggttcttaccttccatcatgtcagacagcctggtatagttgatatctgcctaaatatctgcctcttcccctgttttactttcactatcgtcatgttctctttgactctctcctcgtaacctgcttcttccctcttctagggcctcccaatccattgacaaacagtattgaaattcacagaatatttgtgaaatgtctttaacttttccctaatgtttacatacttcttctgagaatattcctgggatgtactccaaagcacattttaaaaccaaaccaaaccatgcaagttacaggtgttcaggtgtctaggatagaaacataactttaaaaaaaaaataagtgcgacggtagaatatttaaataaagaatcctaaattattttgtggactttagtgctatcaataaaactgtgtttttaagaagaaagatctgtagctagtgaaaacatctctatactcccatatagtgttgaataagtggttaattcatgacatgtaacagtaacctttgttttgcttattgggcttaattaaagaaaccaaaggaaagggcaaagaaagtagttaaaatgtgaatggatgactgtcacgaagagaaccaaacacttccgtttctgaatcttctctgaggattgatgttggagacaacctctaacatactcctccatttaggtcttgcacctcacacctccacccaatcgcctcagaactggacctgtttctaaccaacagcctgtagcctgggtgatgaaacgtcactgctgtaattagattacagaacatggaaacttccacttcacaggcagatttcgttcttgccctctcagctccatgctttgacggcacgtgtccacgtgctctattagtacctgtgggtaaactgagggcagattctaggcagcagctgttgaggactagagcacttcaatccaacaaactacggggaaacacatggggcttagaagtacagtgagcttggaaacagacctgttccctgttgaatgacactgcattcttccattagagctctgtggaagagcatcaaatagaaaagcaaactaaactgtgcctggattcctgaccctcagaaaccatgagataataaaagtgcaattagagtttgacatcaaatgttaggctgcagcaaccaactaacacaggaagtcttgttttataccatgaaaggggtcaaataaaatcaatttgaaatgctaaaggattttgtaaacatatcctgaaatttgactgttaaaatctaatccccgtccctgaaaaagagggcaaaggaaagaattcaggtgctgtcactgcaccggacagattatttgcacaagcttacaggagaataatgtcatgaatacttcggtatttaagatttgatccctctgcttatcccagaatgtatcgtgatctgaacaggacagtgttcatccctgggttggcaacctgtcgtatgtgtgcctgggggaggtcttcaccccttcatatggctttgttcatagggaaggggaaatgcgacactgggtccctaaggatctctttctccaccagggagagaagactagatgaatgagctctggtcctaaccttgtggttttattgaggagtttgtgcactgagaccttgcagacagagaggtcgctctctgctctctacctatggagacttactggagcgtgggttttaggagcccctggctgtgatggagggagaaaagaactgctcacccttaaccactgactcctcctctcagtaccttgccagaaggagacaaataagtgaagttgagtcagagagttaaaaacttgcatccaagtaggtaatgtgtgattttctacatcagaattttccaggctaggtatattgaattttagtagtgaatgtgtacatgtatatggctgaatcagacagactagggctgggggggggggtaggggtggggcactccgagaagtggttgtgtagctccaggcaatgaaaagaagaaagttcttctcttcttgtgtattgattcttcaggtcctctctctgagccatggctccacttcatccaagtgtctccgtcctgccaaatgttgacgcctgtccttggggctgagttcacttggcagtgaagaatgcagtcacattcatactgccatttgactactgtttttgaagctcagccacatgatcctgtggatgcgtggatcaatataggttaatatcattttattcagggagaaggcgcttacataagaaacagatgactgacgcaaatttctgctccaaggatccacccagaatgctttctgcgacgagactggaaccaagagagcaagcatgaatcctgaccccagacctaatcctactcttcttcaggtctccacctatgaccgtgcccaaacgggcgaggtcagcactacaggtggggggtagggggtgggggtgggggatggagggtggaggggtagggcaaggggtgaatatctcactacaattcccctgacccttttggtagaagagcaaaagtgaatgtagctttttattacgaagatacactttcagtttggggaggggcaatgcgtcctaatacataagacagatggggtacagcacacacattgctagtgagccttcctgagtcatcaccatttagagtgcttcatgaaaaaaaatgtcaccatgaaaatagaatgcaccaccctgtgagggcatatgaaggacaagtagtcagagattaataaccagccagtcagaaagcagtcatgggttaaaaccaaatgccatagacaccagctcattgttacacgcatttgcttatgaatatgctctgctaaatcagttctgtgttagtcagcatggaccaccataatgaagtctcacagataaagcagtttaaagagaaaaaacttatttctcacatttctggggatgagaactactaggtgaggtggtagcatgtttgagttctggtgagggctgtctgactcgcaccggggagtccacccaccatgccctcctggagcacagagagaatgggagagggagagcatatgtatgaaagagctctgctctctctctctctctctctctctgtctccctctcgtgtgtgtgtgtgtgtgtgtgtgtgtgtgtgtgtgtgtgtgtgtgtgtgtgtgnnnnnnnnnnnnnnnnnnnnnnnnnnnnnnnnnnnnnnnnnnnnnnnnnnnnnnnnnnnnnnnnnnnnnnnnnnnnnnnnnnnnnnnnnnnnnnnnnnnncaaaaaaaaaaaaaaaaaaaaaaaaaaaaaaaaaaaaaaaaaaaaaaaaaaaaaaaaaaaaggtacgatcaaactgattacaaatcctagctaggcttcggccttcacaaccttctccttttctctgtaacaagggctcactattatgcaaagaaaggaggccttttctttgcagctttacagagctttatggaagccgttttttaatcacactctccttttcttgcttgcacttctgacttctctaagttggcaacagaattttaagttcatctgtgagatagcatcactctttaaccttggacagtttaaaagtctctatcagggcctttctgagtgttttattgcttcattcctttattctcatgtcaaggacaagttgacttgagccaaaaaccaaaattagagcagagtccttactctatttccagatccgctaaaccaattaatacaatttaattagaacttactttctttctcttctgcagaggggtcttgggtgcagctgttgtgactggattttcagttcccagctccaacttcatttaactgttactgggacattttaaaagttaggcacacagcgtgtgaccctactgtcttgaccttaagtttcctgtgtggttgtctctagtaaatcgccatttggaactgtgtgttttcttctttttgaaaggggacgggtgacttactttctgtctgtctgagaagcagtccctcagagggacatggaccttcagtaaactgtgtttgtgcatctcaattcaattgaatagatccgagtgtttctaatatcaccggaaatgtcctctaatcatgtcaaaatgcacttctacctcacagttattttaagtaaaaatttacagcagagatgcttgtcttttctacctgtgttgtttaccttgggtgtttctgtgaggtacacatagaatattgtccaagtaatcctgtaagacacacacacacacacacacacacacacacacacagagagagagagagagagagagagagagagatagcaagataaccgtgtaaattatatatacagtagccacaaaatcatccaggcacaagaaggatctgtgagaaagcatccttcttcccttgaccccccttgcattttggattctttccatttagtctgctgtagaaagagttcaaggggcttccttaatctacacagataggtttccttcgagacactcatctgctcttccttaccctttgtgtgtctgtgaaagcctttctgagacaaaaagatcagaatagtttctctagtttacctcagaactgtgtgatctgcaagagacagaaactctcagttaccccagcagctcaagtaactgcgagtaacaccggttggagccagagacaggcaggtgtggctggcacatggccctcccctgtccctgagtcttccttgccaggttgactaccagacaactttagaaatgtcattcgccatgttccaagccagaaatgatgaaagaccagaaaaaaagacaaaagtcttacactagaagagtcggcattgtttctgaagggtttccagggagccccatctggggatgtctgcacaccttgtttagatccagctgtgtataagaggactcttggaggttgaattttttttcatcattattcatttaaatgaaagtgatgttcctggaatttaaacatttgcaaaacataattgctaggcaactagctattacctgccatggcctcccctcaacctattcgatgtctgcacacaccttcactctgctgctgtactccttagcaaatactgtaaagcactttccacactgtgatttgttgtggggactgagggtgatgccagtgccacttagagtcaagggtctagtaatgctgatgaccctttggcatgcagattctagaataacaagttgtagtctcatttagaatgccaatactggctcccattgaaacacacatcaaatcagagaacaccacttgtcttccatttcttttctaagccagagtttccatgagtttccagaacagtgtatctttttactacatgtaatgttttactctctaataaccctagatacctgctttcaaaatacccagtgtttagtggtagtgtggggagagcattagcagcagtaacaacttgatttgggaaaagtgaagtcaatggctgccacaccttatccgatcctgttggtaagagtaaaaaaatgtttccattgagctatgtggtgtctagggtggagaccttggagatctctaatgtattcattccctgctactccaccattattggatattaaggtagagtccacctacctgtgatttaagtcacagggattgttttgggagttgaatagtcattggcaaatgttgttctgtcctgcgatttatttttttctgggaaaaccaaatgggtctcttgaaagttaacaagcttctggattatttgctttgaccaccctctgagtagtaatagccaatgattctttgtggactaagttttatatattaaagtatttcacttacttctaagaaataaccattttgacaacctcctgtagtcactgccttgagataattagaaataaataaggtggtaggataagcacttaacatggagtttttctccaatgattgctacctgcatctggcaggaacactttgtgaacttatgggaaatcccgagtaacagtgtaacactgtcttttgtaaattgtccgctgtttaggacagattagatgtcctaaaaaatactgctaacctgttaaaccctgtgaggttcaaactatataatgttcactcaatattgctatagccatcctgtgtaaaaataataatactgcatgtttcataacacccaactttaaattatagtacagagccatagtgaaaaagctagcattgggttggtataaaatcagacttgtaggtcaatatcatggaatagcaggaacagaaataaacccacgcagctacagctacttaatttttggacaatggtgtcaacatacattaaagaaaagacagcttcttcaacaaaggatgctgggaaaactgaatttctacatgcagaaaatagagccttacctctcactctgtataaaaatcaagaggagcaatgactttaacatagaacctgaaaggccaaaacttggagggaaaacactttaaagtataggaataggcaagaattctgataaaggtctcaaacagcatgggaaatgaccccaagaattgacaaatgggattacactgaattaaaatgtgttttcacaataagctatcagcagagaaaacagacagaagaatgggagaaaactttcactagctacacttcaaacagaagagttaatatttaggaaataaaaagaactgccaaatttaaacaaacatacacactcatgaaacctgccaatcattaatcaacataatgtgttgaatgtacagttctcagaagaaaaaacagaaatgacctataaatatttttaaagtgtttaacatcttcagcctcaaagaaatgccaactggaaacactctgagatttcaactcaccccactcagaatgactatgaccaagaaaacaaatgctggcaaggacatgggaaacagcaaactttattcactgctggtagaaaagtaaactgtacagtcactgtggaaaccagtatggaggcttcctagaacactaaaagcagagccaccatatgactcagttatatcactcttgactatacccaaaggactcagtattcctacaggggtacttggataataatgtttattgttacactattcataagagctaaggaatgaaattagcctggatgtcaacagaggggtgatataggcacatataaattacatatatatatatatatatatgtatatatatatgtatatatacatatatatatgtgtgtgtgtgtctaatgtatggatatatacagatacatattgtatatggatatatggaaatgccataattaaattttcataaatatatgaaaatgccataaataaacatggatagatatgtgttggtatatatcatatatgaatccatatggaaatgccataattgaatgtattattttattaactaatttaaaaaataaaaataaattattgcctcatgtataaaaagtgattgttctatctctattttcattactaagtagataacttctaagatactcctagtcattttgatttcaattttcataactcaaaaataaatgaaatcacacacacacacacacacacacacacacacacacacactcaccttcttcagtacctatcctttaaaactgatttccttttggaagatgagtaaactctagagtaaagcccaacttgtctaatacagtcttgccttctacctcttctagagacactgcaggcctagtttcttcatttctttggattctaaatccctgacgggcacctgaatatcctttgatggagacaggtatctaaacaaagaaaacccctttcaatgtaacgttcagcatttcctttcataaaatccttcaaacattctttgctatacatttgcttctagttatcaaattttgtaacacctcaactttcagctgtgtttctcagtcttttcttcaataccttcatctctttcttcatctggtattcatttctgctttcttttagagccagaaaaattggttcttcatttattttacaacagatcatctgactatgtccctaacccttcccctataaaaatacttttagagaagagtgatgggggaatgttcttctgtgtgctgggaatttatgtttctcttatgggttgaagaataaagatgtttcagctgtattcagacagggatagagcaaggtagtaggtggagtcagggagatgttatgtagccactggaaaagtaggacacccaggcattctctggtaagccaagacaacgtggagacagaaatgcattaataattaagagagaactagccaataagaagccaaaaccatctgccaaacagtttataattaatataagcctctgtgtgtttatttgggactgaatggctgtgggatcgggcaggagagaaacttctgtttacacaagcgcatactatatctgaggatttcaatatgaagcttttggatgaactccccttttgagaatcttctagtacaaatgtttataaaattattgtgaatattgtatgacacagcagatgtaggagtgactaaagagtatcatgtgcatttgataaaatctcatttctctttgctaattataaatacttaaatgtgcatcagcatgtcattatttctaaaataataaaacatgacatgattaaaaatttgagcaactaacatgaatttggtggtttatactcaatctttagaaattgaaaggctatctagaataatcttaagttaatagaatctctaagagttttctagaataatcttaagttaatagaatctctaagagttttctcaactaactcaattaatttttaatatgaatatcacttctcattgcacatcttcatggatctacatgaattttacttatcttatatgctgtgtcaaggtatgtgaaatttatcataagttctcattgaatcttccccttccttttagggtatttagttcaattttcagttatatattcacccgtggaattattcacttaatatctcccactcgttggactgggctatacaccaaacagaggcagagcctttcccttggatctagtcactgagtatgaaatgctctcttggagccatgttctataacccttgtgggcaattacgacctttcagagctttggtggtcagtggtgagcctttgccatccaatgcaaccaaatctcgggagaacattcagcccttttataatctgtgtgcctggtttacaaatgcctcctctaattactcccccaaaggggattctcccctcccatggtaaaatgatcttcctaagcaatgtttacactttctatttattccccttccaggctctgtaggggaagctgtagccacgcctacttagggctggctacaggtgtgcctgaccatgcttgctagggcatggtcagggtgatgcagagtgaggctttcaggggaccgcatttctcttttgtacttgaggacagactgctgccacaccggctggctaggttgctctgtaagtaaggcttttccctattaaatacccttgtatttctacatgactctgtattggcaatttcccactttatctggttgtcaggagcgggatattggaaacctacaccccatttgggacaggctgtgggtcccactgggcctgtggccttggtggggaaaggtccctctcttcacaggtgttgcgtagaagatgtggtaagggcagagactggaccaataaatgtagatcgaccagggacatacaaggaaacctgttaaggtcaggaaaccctgaggggggcgactcaagaagtcccccacttcgagaaaggtcgggtcattccccggtagcagtgggagacaatctctcacaggaccaatagatagttctttgtctattgtgaaaaatgattctgctctagatggtagcttgaatagtgatgaagaatcaagtgtgaatggacaaaatgaggaacgcatattttggcaaacttctattaatgataaaaggcctcagttgaaagtgaaaattaataataaagttatttctggcttagtagacactggggcggatgtaactattattacccaaaactcttggcctcaaaaatggcctcttagagaggcaaatgtacaatttctagttattggaactctatctagagttcaacagagtgttaactcaatggtctgcattggaccggaaggacaaaaaaggatactgaaaccatacgtggcagatatagctataaatctctggggtcatgatctcttacagcaatggaatactcagattaatattcctccaatgtcagatacaaattatgtacaatctttagatagtagaaaagatctggtaagacgctatggaaaacggttaccaaccatccatgctgtacagaaactacgtataaatgatggaccttcagaggagccaaaggctctgccattgaaatggcttacagatgaaccagtttggatagaacaatggcctatgacctctgagaagctagaagctttaaaaaagttagtacagaaacagctagacgctgggcatatagaggaatctaccagtccttggaattctcctgtatttgtcatcaaaaagaagtcaggtaagtggagaatgctgacagacctgagagccataaataaggtaattcaaccaatgggctctctgcaacctggaatgccattaccttccttaatacctaaaggatggcctatcatagtcattgatctaaaagactgttttttcagaatactgttacaggaaaatgatagagaaaaatttgcatttactgtaccaactcttaataattcacagccagttaggagatatcagtggagatttttgccacaaggaatgctaaatagtcctactttgtgttagcactttgtacagcaacctttggaaataattcgtaagaaattttcacaatctcttgtttatcattacatggatgacattcttttatcagattctaataaggaaactttggaacaatgtttgaaatggtgaaggaagttctgccttgttggggattacagattgccccagaaaagaaacaaaggggagattctattaactatttaggttacaagatagacttacagagaatcagacctcaaaaggtacaaattaggagagatcgttatcaaactcttaattctcttcagaaattattaggggaaatttctcaattacagacgattatttggtgtagaaggacatgacttaaagcatttaaaaatggcccttaaaggtgataaggacctaaacagtccgagaatattatctgctgaggcagaaaaagagttacaatgggtagaaaacagaatattggatgcacacatagatcagataaaccttgatttagactgtgctctggttatcttgccatccaaagaatggccttctagaattctgatgcagagggaagacactatattggaatggatatttctgccacataaacagaataaaaagttaaagacatatatagaaaagatttctgatttgattttaaagggtaaattaagacttaatcagctgactggaaaagatccagcagaaattatagtacctttaactaatgaagaaattttctccttgtggaaggataatgaatattggcaaaagctcttactgactttttgggaacaattagcaacaattatcccaaaactgacagaattaaattcataaaaaggacagtctggattcttccacgtattgtaagacatactgccatttctggagttcttaccttctacactgatgccaacaaatcaggtaagacaggttataaagcaggtgaggtaagtaaaatagttcaaagtccatatacatctgtacagaaggcagaattatatgcaattcccatggtacttatggattttacagaacctcttaatatagttactgattctcaatatgcagagagagtcgtgttacacattgagactgcagaatttgttcctgataatacagaattaacttctctgtttttacaattacaggaaactatcagaaacagaagtaatcctatatatattacacatatcagatcccatacgggtctgccaggcccactagcacaaggcaatgatgagattgatcgtttattaattggaagtgtgctagaagcctcagaatttcataagaaacatcatgtaaatagcaaaggtttgaaaaaggacttctctatcacttggcaacaagccaaggagatagtaaaaatctgtcctacttgttccttttataatcaaactccattgccagcaggttgtaatcctaaggacatttggagaaatgaggtttggcagatggatgtctttcactttacagagtttagaaatttgaaatatgtgcatcatactatacacattctcagggttccaatgggctactgctcttaactctgaaaaagctgattctgttattacacacctgctagaggtgatggcagttatgggtatacctgcacaaataaaaactgacaatgctccaacatatgtctctacaaatttcaaatattataacataaagcatgttaccggtataccacataatcctacaggacaaacagtggttgagagatctagtagaacacttaaggagatgctcaacaaacaagcttggaagactaaaccccccaaacataggttacataatgctttattaacactaaactttcttaatgccaatgagaaaggaaaaacagctgcagaaagacactggactatggaaaaaaaactgctgaactcaatcagccggtatacttcaaagatgtacttacctctgaatggaaaccaggacatgtgttacattggggtaggggttttacattggtttctacaggagaagcactttggataccatcaaagttgatcaagattcgagttgaaaaggaaaaacctctcgatgaggagaatctactaaggtatatattataaactaaatagaaaaggaaaggaaagtgttttgcttttatcttcacaggaaaactcatctccagtagtcaaaggacactacatgggtagatacttaagaagagaaggtagctataaccatcaaacaaaaggaacgtgctatatggtaaactttacagctgtatctcagagaactctatttctccttatttcctagtcccaattcaattaaaccaatgctgtatttagaggtggatttggctttactcctctaaaatccaagcacattatttaactaaactttagagtttctgtattgtatcaagaagccaattgatgtaatacagaataaaagaagaagtctttgtcttttcttggatctttctttcaaggtgtacaccctctcataatcattatttccccatggttgcctttcccagcatgtgtacatcacaagcaaacatttctctgctgtttatggttgagtccacatagccaataaagacctgcctgacagcaatccctagacaccctggaaagaaaatgggccacacctccttgactgcactggatccaactctggccagtggttcgggtactgacttcaatcaagttgaggatttcaagcgtgatcttcaatcaagctaatcccatctaacatggactggatacaatccattcaaggctttcactatactaacattttcttcctacaggaccccacaaggctattgtcatcctgtttcagcaggaagtaacttggaggatgctacgccccctttccccattgttgtcatttaggatagtgtatatacctagttagggatagcttcctattgtttatggttggacacctctttcatatgactttagggtttagttaaaatagttaggatgtgacataagcagattgttgtatcttcttatattttacctttgtgattgttaattttggatactttacactaagttttaatcctcttttagactaaaagtggaattgtaggggaagttgtagccacgcctacttaggggctggctacaggtgtgcctgaccacgctttcgagtgcgtggtcagggtgacgtagagtgaggctttcaggggattgcgtttctctttcagtttcacttttgtacttgcagtacagactgctgccacgccggctggctaggttgccctgtaagtaaggcttttccctattaaatacccttatatttctaactgactccatattggtaatttcccactttagggctcaaatgaaggtcccacccgcttttaggtagaaccttcagcccatcatttgggaaggtggaagtctgttctgtttccttaatttttagcacctatcgctattaaaataagtttactgcgtgttggggacagaaagaaggctcactggttaagagcacttgatgctctttgagcgtacatggctttggtccgcagcacccacgtgatcacgcacaaccatttgtaactcctgttccagggaatctggtgccttcttctgacttgcaagggccccaggcatgggcaggcgaatgtgcatacgcttaggccaaacactggtgcacaaaaaataagtaaatctaaagaaaatagcactttgctacatcttgttacatgcttcaatggcaataccctcattctctcaaactttatatacttggctctataaaccaatgactgttactttgcagggtttcaacaaatttttctttaaagaatgaataaataagggttgctgaaaagttgaaattcattaacactacttcagttatttgattacaatttaaatctgtctctctttctctacacacacacacacacacacacacacacacacacacacacacacacaccaaattttgttttttccaaatttcaacatattttataagggttggaatgagggagattctattccctctgatttaaatatttacttgttcattagatttcttcagaaaatattctaaaattatgtgggcttattgtctgatggtggtttagccagaagggggatctggcaacatgaaacatttattaaacaaccatttggtttcagaatagaagcaataagaaaaatgtactccagagatacatatctttacagtgttctttagtggcacacaacaaacttgttcccaaactgtcttttgtaaggcaaacattttagattaattcatgtgtatctattgatttaatctctttatcttaattttctataaaccatgacattatactccaaatccagctttgctttgttccatctgtcgccacaatgtctcatcaaatatgaaggagatgggtgttacaagattgccaatggataatgggatggaaaagggctaccgatcaagattcaaatacatatttggcccttacagatgtggtatatctgcggatgcttacagtcacttttgtgctcagctaagttactgctaaatagcctgctttagaagcactcctgctccctgagctggcccacccagaggaggagggcatgacagctacagcatatcacttatctgtttctaattaaatgagtcactccccaagagaggttgacatgctcgacaatgccttggtaaggtgactcatacagctgagtgaagcctcaacttcagcttcattagtggagttggaaattgttctctggtaaccaccatcagagagaagtctatgaatcaccatataaaaccaatctgaaagccatccaccttgtcaggtgtgcagttactctgcttgtgagggcccaaataaagggcaaattacttgctcttttatgtcttgtactcctttttatctcattttgaccaatgaaggatttttttgtttgtttctaaatgtgttactcttgctaaagtcaatgtttggttttccattcttattttctttattaaattatagattcaagagagtgcaaatggtaaagaagctgggttacagtaacaggatccatgaggacaatgtaaagcttaactatattgatctttaggctacatcaagtgaagatggggggtgggatagttaatacttcttcaacagctgtactgagaacacttaaaaatgctgtggatacaggagggcatcagcactttaatctatcttacactgataaaaagaaaaccatgtaacagggagaaggccagggcaggttttgatggagccacaggcagtagaaacaaaaccttctttgtttggagactattgcacctgcgttaaatttactgctgacatctcttggtagaaatttgatttttctctactgcccccaccctttattgttttcaacacggaagaatgtaaggcatgccacttgtcctcctggtcgctgtagtggttctgtctgcaactgtgaaagggagctgagcttcctccccaccagcccctgccatcagcacgtcatcggggcagtacacctgcaccgtaattctatcctctcccttgtagagcctcatacttctgtgacacactcaagagatcaatttcctgtggatctgggctgtggagacagggccctgttctgacaaggaagggagctttcaaataaccctgatgactgaggacggctcaaatagacagacagacaacccttagaggggctgttatatcaacactggtggttgaggaggcactttagagaaagaaccatgcctgatttcagtatctgcagtgagtcaactctggtgtgggttaaaaaaacaaaaacaaaaacaaaacccctcagctatctcctaatgaaggtgatcagtagtagcagatagtatataatgtcagttcttttgcccaatcattctacccactaagtacaaatgtatcactaaagatgtgttctgcttattttagctttctggagctctctttgtggcatcaaaaagactgagtttatcccacttctgtgccttgggcttacctgtgccattgcagcagtgactctgctgggcatttgcttccttatcaagctgtcctctgagttccctaaggcagagctagcttatattctctggacccctgtgcctaacacaacaatgcatctcagaagatcactactaaatgcttggattttgaatgaatgaataacaagtgatcagtcaaatgagttacctgctacagggccctgaaggtacgctttttaataaacaatttttattgtttgaaattataattacatcaaatttccattcttctctctaatcccttacatgaaccccacttcttctcacggtaaattcatggcttccttcttttcttgttattacacacacacacacacacacacacacacacacacacacacacacacacactcaccacagaggaatattttaggaatatatatattcctaaatgcataaatacaacatgttcagtcagtacaatattgcctgtatgtatctgatctctcagggccgaccacttagaattggataattaatgagggatccataactaattagggatctcttccctagggaagaccattcttcctactctttttaaaataatttatatatttcatgtacattcatattttgcctgtttgaatgtctatgtgaaggtgtcagatccctggaaagtggagctacaggcagttgtaagctgccatgtggattctgggagttgaacccgggtcctctagaagagcagccagtgctcttaaccactaagcccacctcccactcttgatatgactgtgtcagttcaactttctctttcaacttgggaattcatcttgaattgaaaaagaagagaaaggtgaggaaggagagtgctatgggataatccttctgtacacagtgagtttgtattcctctcattggttgataataaagctgatttggcctatagcaaagcagaacaaggctaggcaggaaggccaaactgaaaagacaggaaggaagagaacagagtcagagagagatacaagcagtcactgggaagcaagatgttagaggacaggtaaatccacaagccatgtggcaaaatacagattaatagaaatgggttaatttaagttgtaagagccagttagtaataagcctgagctataggccgagatgtctataatttttttctttctgtagttaacataagtttctgtgtgtttgtttgggactgggcggtcgggacaaaggaaaatctctgcctctgcttatggagagaaaggcagaaaggtacagtttgttcccttggagtcagatcagtgggttccagacatggtgctgagccctatgagttatgttatggagaattttcatgttggagaaccatccttcttactctaaaatgaaattaaaataagaaattaatataaaagtctcagaaaaaacttggttcccccaccaccaccaccacacacacaaaagtttgaaagcaattggaatttagtcaaagaggggtgagcagaagctttgactttgccttaacagatacattttcttatattaaaatagttaaagattttcaaaacgtcacagcaccagatgaggagccctctgccacctctcttcctatctggtcagaaatccccaggcagggcctggcttagacttttgtgtgctttctggatacctgagaacttctctgtggctgcaaatgtgccagaggctaatttgttcttctgagaagcagaattaagatgaaagccttctgtcttttctcagactcagaggacactagtctttctttcccttttaattctgcaatttaacctttaagctgagcatcctctggagtcatgccaaatatcatctgtgagcttggctagaatcaccccgctgaccatggctgagagattgaatttctgcactccatgattgcttccaaagtggcacctgaccttccatatgtaagctcagcttcggctcacacatgagctgcccttctgttgtgaatatcccacatttctccctctgtttttccttcctgttttattgcttcttaggaagtctggtctctctctctctctctctctctctctctctctctctctctctctctctctctctctctgtctctctgtgtgtgtgtgtgtgtgtgtctgtctgtctgtctgtctgtctgtctgtctgtctgtctgtctctctctgtgtctatctgtctctctctgtgtatgttttctgtctgtctatgacgttgttcattagttttcattttacatagtttaagcatgctcactgaagagtcttgaaagttcacactgtttgccaaactttgcttctaattcccaagtgtctttggcttgaatgaacctgcacatgctctctatataagggtatacctagtcccactctaccagctgcccttcccagtgagagggcaggatcttcctctgtcaccttgagcctggctgtctttctcccagctcatcccagtatgacacacacagacccttcactcaaacttacaatagtagctgagacctcattgcagcttgctaacaagtcttaaggaggatagacttccggctctgtttatttcaccatgtgatgtcttccatttgaaatgtctttaggataaatttttaataaagactgaccatcgactatggcttttctaagactctacagagcaagtctcttctgttgggcacctctgtctagatgtgatccttcaaacttgttcttgtgatgtgttccatgtatcttgatcatactacgtcgtttagctaatcacttccatgtctcctacagtccattctaaaccatctactaaggaccatctcttcctgaagaaggaagggcattttgtgtctttatgttagtccaaagtctgcctctgactcaccactttttctgtcaacataaaaattctctggaatgtttttcattgaacttctctattctcattgaggtagagtcatttggggggttggaggtgtgtcatcttgtctttgaactccttaaagcatgactggctactggctactgtatattttgtatgcagtgtgtatttttcaattcaattcagctcagttgaactgccctatactgacaaacacatgaggaaatatatcctttttgattacctgatattctcatctcaatataagaacttatgcatcactgtgacatagaatatcaagaatgaagaagcttatattagagtcagtgtagtgtgctgaacatttactgattggttttctcaagctcatgatcaaaatgtggctttgtttatccggaagacaacttaggcaaagctgtttacatattggggcacattgtcaccagcctatctattctagaatgaatttgtatgttacagtaatagaaccaaaaggcctatatatctttttcctaaaacatggaattatttactttcaagcataaatgtaaaaatttacctcaacagaagcaaagttctgttttgtcctttaagttgggtttccctatttctatttatgatcagattttatatcattttgatcacttaatctttgctaagatacttacatagcaatataacaggacattgtatcaaaatcaatttttgaggcattaactgattgtttttgctctgtattcatgaaggtaaatgccctttgcattgtttttttttcctttgcattgctttaacctgggtatttgcaagatagaaattagagactttggtaaagtatctacgtacataaaattgtagaacacactcatgtgatgcacattttctattggggaagaggttattatgatgttaaaagtaggagtgaagctactccattcttaggcatatacccaaaggacactccatccaacttcaggggcacttgctcaaccctacttttttgctttattcataatagccagaaagtggaaacaacctaaatgaccctcaactgaagaatggataaggaaaatgtgaaacatttacaaatggaatattactctaatgtttaaaaaaattacatcatgaaattttcaggcaaatgaatggaactagaaaacatcattcttagtgagataacccagacccagaaagatgattatagtatgtattcacttataaggggatattagccattaaataaatgataagcaagctaaaatccataggcctggagaggttaagtatagaggaagggacgagacaggacacatagacatccctaggagggggaactagatttatgggtggacttaagctgggaatgaatcaggggatggggagggagacaggagatggggttgagggagtgatttcaggagagacagctagaattgagaggcatttgagggtggaatggaaacctggtagggtggacactaggtgatcctaacaatttctccaggtgatggatccccaactggccctctcttgtcagcagctgaagcttccaggactggttctgggttatgttctattgagttcttcatccaaggggttcctttggaaacagaaatctccaaacaacccaggctatttccaagacaataggttgctcccagcatactgacagcaaggccccattgctgaagacaccaacacaacccaactggagaaggtgagctggtgcctacatagaatgttcacccctctcctatgttctaatgtctttactataggatggtacttttcatgctacccaaagagaaatgtaaacacaaaacccagtcacaaaacctttaccatttgtcctgcctacaaaatatgctagggcaatggtggcacaaagtctgtgggagtaaccaaccattgtctgatttgacttagggtccactccatgagatggaacctatgtctgatactacttgggtgactgagaacctgggactagataagacctagggtgaaaccaaatactgctggccaaaaaccaaacaaacaaacaaacaaaacaataaattaattcctaatgcttttctgctatctcagaccagtgctttattcagttataatcagagaagcttcccgctgcaacagatggaaaaaattcagagaaccacagctaggcgttacaccaagagtgaggccttgaaacacagaaatctaaatgggatgcctccatcaaatatctccccttagagctcagggaataccctacacacacacacacacacacacacacacacacacacacacacacacacacacgaaagaacaagaggagatagaagacatcaggagaacatgaccttctaaacaaactgcgtgaagttcatatgcgctcacagagactgaagcaataagcacacggcctatatgagtctgcactgggtcctctgcatacatattatagctttcagtttagtgggtttttaagggggactcttgagtgtatgaaggggtgggtcttcgattcttgtgccctttcttggggctctttacattctgttggtttgccttgtccaacttcgatataatttttttatcttgttactttttactttgttaaaaaaaaactactactagtagtagtaatagtagtaataataacaataaagttgcttttgttaagtatttgaccacagaaacaagaaaagaaactgaaaaaaaatttcagccactagacgcctacaatactcattctaaatattattagcttctgacattaagctcagttctaacatgaacattatagacttctagcacttttatttcattttatgttgtctgcatagatgtctgcacgtcatgcatgcctggtgcaggaggaggggtaaatgtgtagtttgagtaacatactgctttcttcactatggaaactaatcatgctagctgggcatggtagaaaactctttcaatcccagcacttgggagccagcaacatgtctacatggtgagttccaaacaagtcagagctgcacagtgagactctttctcaaaaaataagaaagaaaaagaaaaaagtcatgtgcctcaagacagtatttttctttctaaccacttttgaaagcttaggactggctttattattaaagagcatttgcatacatcataattgtcatgtgccaggcaaaatcctcggtgccttataaacaataatgaactttctcagcatcactgcctaggagatgtgtactattattgttcccagtttcattaatgaaaagagcacagtcagaggcacaggtgacaagtgacagggctgagatataaacccatgcagctgaactgagcatctgtactctggaacacaacacatggctgcttttattttcccatgatgtcactattttatcctgttttggttcctgactgtattattactttaaactttgtattgttctaaggtccctgttttttcttctgtgtgtctgcagtatcaagcactgtagttagtagacagaaggtagtgagtgagtggttttacatttcgcaatacaatagggaaatgaagtttaagcactctgtcttgtctgcaacaggattgtagtaacagtaatatttcctttctgagaatgtagaggggctggatttagagtctcatatgtaccatatttttcttttgggccatcaaccagcttctaaatcattattagttatgaatgctctgcctagcttaggctcatttctggctagctcttttaacttaaattagcatgtttctcttcatctacattttgccttggggctttttacttttctttccttctgtatatcttactttcattgcttctcttgactgtctgtctggcagctgcctgacttcttgcccggacatgtctctctctttctcctcattgttttcttcttttttctcctctcgagcctagatttctcctcctatttattatctgcctgccagccccacctatcctttctctgcctacatattggccattcaactctttcttagaccaataagatgccttagtcaggtaaggtgaaacaaatcaaacgcatctttacataatcaaacacacatccttacacccttaaacaaatacagcataaacaaatgtaacaaacctttacacagttaaggtaatattctgcagcataaataattgcaacacatctttacatagctaaaataatattccacaacactcatataacccaggctgatctggaatttgctaagcaattgaagaagactttgaacctagaatccctgggtttctgtctaccaaatgttggagttacatgtgtgcccgcagagctctaggcaaggactctagccacggcggtacatccctagccccaacaatcattcacgccacaacgtatttgccttcgtatcccccgtgtgctttctcatgaatgtctaagccattatattttcttactccccaagaaaactgaatttttaagacagtatttgttggtaaagattgctcaagcagtgacattgtacatgaatcagaatgtcatccagcatccctgaaacaaacagctcatataataatgataattacttatgtggtgtcttacatgttaacaatttttagttctttcaggagatcatggtgaataatgtctataaactataaaatatgaagctatataatctgtttaagggcactattgacaattgcctatgttaaaggcagtcactgaacatgtatcatcacttgtcaaattatcccaggcattgagaaaatgtatagatatcaaaaaatgttcattttatttatttaccttatgggttagcaccatctacattgcttacaaattttatgatgcaaaatgtttaatcacagaacaacacacattcaatttatatatgtattgggaagggacttttgagaggaggcttttcgtttttgttttctggttgttttatttgtttgtttgttttttaactgcactttgcagccaagcatagccttccttgaacttgtggtcatcccctttgcctcagcctcttgacttttggaactatagacatgaactgtcttcacaggtgccattttgaagcaagcctcttgacaaatagaaagtgaaaagattggggtagatctggaagaagttacatcaaatacatcaaagtattctgcacgaaattctcaaagaattaataagtttaaaagtttcatttcttaggtacaagcaaatttgtgagaaggcaactataatcccaatttcccatggtgattaatttggcttttcccttagaaaagttgaactatttgctaaaaacaagacatgccagcatatataaattgtgtgtgtgtgtgtgtgtgtgtgtgtgtgtgtgtgtgtgtgtgtgtgtgtgtatgtgtgtgcagttatactaattgatagtcgaaatacagtatttaaaatacttcctcaaacatttctagtcataactgctctgttttagatctttcataaaatgaatttatttaaaagtatgggtcatttatattttagggttcctgtttatctctctgtgttttaattttttgagggttttttctttttgcaaaaataaaatattttttaaaaaattagacaaactcagaaactgagaaaataaacatatgaaaagaaagacaacttcaatattgttttaatacaagcatgtttttctcattaaatttttgggatggattaaagctgcaccaaacacaagccaaaaataaagctggagaagctcaggcttagagatcttataaaactacaggtcccgagcccccatcttctttcaagggactgatttctgaactaagcatggcagttcacttgatttgacagctacctgaactgggccaagaaaaaggcaaccttttcttctttaaaaatacctctctgcttctacctggagccaggatgttgactgggctgagctgctacctagggccatgtctgggtccgtagtcctatagccaccagggtctgagaggacatatgtgcctcctgttgccactgacggccatgagcatagtcaggatcaggtctgcatcttggtggccaagagccatgatgcagccagggccatgcagatctgagtggcctgcattgctaccaaagctatggtgacatccaggacttagctgtgaatgagggccatgtctgggtctgtagccctactgtagccaaggtctgtggtaatgtccaaggctcctgttaccatcaaagtccatgtggacacccgaggtctgaggacatgttggtggctgaggatcacactgttgttggggcaatgaggaactgagtagcaggtactgccacctgggcaatggtgatatccaaacctggcttctaccgagtggtcctaccgtggctggtatctgtgccgaagtccaagtcctgtattgcagccaaagatcgcacagaaccctggggttgggatggcaactggaggcctttgtggtgttcagggtccaggtcacactgctagaaccatcccagtgtggaaacactgagtggtcagtggtctgggtgtttccacccagagccaggatggcataagggtcaagctgctgcctagggccatttctgggtcggtggtctggctatagctggcatctgtactgatgtctgtagcctgtgtcatgtgtcacctcaggggatcacaggaaccatgcatgaagaaatcagagggtcatcttgagcaggctctgcccttcactggcccaaaagaagttggccttccttcttgctggacactgcagcaagagagctggccctgactctcatgggagatctgacccctgctctctggagagatggtcccacccctcaccacaggtgagggagaactgaccctgatagaatgggcatagagaagctggctctactcctttgcctgaggcagatggccccagtggcctgaaatgaccagctcagctaccacccaggcctccagcagaatcttgggttggcccatcctggcatctccatcttggacctactggagcttgagaaggaattcgtcctgtggaacaataccagcaggatctccatgactctgggtggccatgagatatcccagagctttttggagctaatcctgtgatgatgggttgccggaaaccagaggctttgaagcaagctagtgactcaacatttgctagtaaagctaattggacaaatgtgacacactgatcccaatgccgccagaatgaatgaagaggtgttggagaaaccagaaaggagaaacaaagaggtgggttttgttgttgttttgtttttgttttgttttgttttgttttgtggtttgttttattcttgtttttgtttgcttgctttgttttattttggtttgatttttaaaaaatttccttttgcagggcatgctacatgggtgaggggggaacatgggggagttaagcagaattataatgcatgatgtgaaattcccaaagaatcaatgaagaaattatgtgaaaaaatagctcttgtatttttatatataaatgaaggattcaaagtagcacacagtatgttatatgaaatagtatgttatagctaaatgatattataatcttaccttttcttttattagataaaaaccctaaccataccagaaatcctgaccacaactaaggcagttcagatagtgctgatggaagctgggtggttactaccaaaacagcagagaggccttcttcaaagaccaaaagtttaaggatgcagtgagaacctactacccatgctagacagctaaagtcctttaagatacacgtggccactgacatggaaattcataaacaagatgggtataccttaatgaaaagccaaatctataataactaactcacttccctgctacccaactctgagatttcctatttccaggtttaaggcaagcctatagccacgcaaagggaagaaattagctgtgattgcttctacatttatttttattgacttccccaaaatttccaagctggagagagaaaatatttccaatgtgacaaactggaggagaaaataaatatcatcaaatcagtctccggttgcacattaaagaaaagctgaggctgagaagaactcttgaattcacacaattgttttccatctatctcataccaaagtacaacctaaaataccaaatccccaaagtcatcattccattcacacacatgaagaaaagcaatggctataaaatatcaagaaggcaggggaattgttatgaatcgttatgtgcatcagagaaatagatttacagacaccccacttgaatgatacagtattaactcagattttaagatgatctcagcatgagatttcaatgactgcttctcttactaagtcatgactgtagtttcttaggtggatgtttggataaactgaagtctctggaggtagaatgactcgctcaaggacattcagttagctgtccagcagatggggtttgctagacaactgagtcttagtctgtcacttcctcctacaccgtcactgctcatactcagcctcaagaaaagatgcgtcaggcaagagaagcagattacagatcaatatcataaggaccatgactgggaaaggaaataacttttcctttgctctaatagccagcaaggctagaagtttaggcgaggacaggcttatgggaacccttccagagctgaagggtttacaactgtttacaatgcattgttgaggacactaactgatgccaggttgtgctgccaaaaggccatgttgtcacgctgcatgaagcccaaaggttgttttggaagtcatttctgcttgctggatttcaggatatgagacagcatgtgtaagggaagtcaaacgagaaaggtttgtatcgttgtattgaagggaaaaaatagtgaaggcttgtttattcaagtaacccctaagtcatgatccataaactcatttctcttattttagagcaaaaaaatgaaacatcttttaacataattccaaaatgtgacatgaaatagaactgcaggagaagtcaggatcaaccaggtatgctgcaactattccttgaacaagccactattgcagacaagtgaacatgaagggtttggtggctgtctgcatggaatgtctcacaagaatcccatgtgctacactggaggatttgaaccttctaagaactgcaatgatacaaccagaacacgagaacccattacagtctttactgtttcatgccgctaaagtgagtaccagaagccctgtgagtttacagccctctgtgtgaactcagtgttacagtacttcttgccaccattgacattggcacacactgttccttcctgagccattagacatctaatttgatcaatttcagaccctataatttgaatccaagccaaaccacaatcaaatcataaaatttctgaagctgccaccatcttggaaatgtcatactcgggaagtgaagcaagaaatagctatacaagggataaatataacccattataaggaattttcatctgatctttatgtgaggctaccaatcaactagctgtaatttgcatatcttgattaacccttcattactttatatgtgtactggaggaaaaatattctatctccatgcaccatccatatcaaaatgtcctaaactcagagtttcaaagtgcagaatacagtaatctttggcacctagaaagtatctaaagtctgcatataggcacaaaaagtaaccaaagaggaggggacatttttgtatgtgcagaaagtgaggctgttagaagtataatctggtttggcagtcatggtcaggcctcctcgtgtctgaagaactgtatgctccatcctaaatccttttggaaattgccagtttgatagaataacattgcaggaaaccactcaaattgaacatgtttgttgttttatgttctgccaggcaaatgtcagaacaatgccaggagaccagagtcatttagaattagagctagcaggaggggaggggaggagtgggaaccagaaggaaaacaatgagaacaggatgcaaagttgctgaaatggggaattttatagtagaaaatgaactcttgcttttaagattttaggagcaaactagattgtgccttctaagttgttttgtggtcaatagcctggcatctaatgtgagaattgtgttgtagaatttaattattgtggtcaaaacttttctgtttagatctccatccattggccaatgacgttggaagcaatgactattaaatagatggttcactcggagaatgcgctggtagaaactcattgttacagttttatgctcttacttgtgttgaatcttttactactggaattttcccctttgcattttttagttatacagcatgctcaacaaattatttcaattattcagaacattttaccctaattatttcttctctgtcatgtaggaagacacagtgagacatagccccacccagacttatttttctaatttttctaggtctgatagtatagtagaacttactggttggaatatcaaatagtcctgcaggagtttaccttgccggcaatatccatactggggaaagctgtgtgaatgaccatgtcagctcagcctttgccttgttttcttgttctcattgggagcatcatcatctctgccaggctgtgggtgatttcctaaggaaacaactgttgctttattcatttatttactaacctctgaggattcaacctcaatagtacttaacaccttcgtggccatgcttgtcttagtattgtagggacagagcattggtttattatcagtaaaacctcttgcccatcactgaaatattaaacctagcattgcatacacacactttaatttactgcattattattgcatttaaacaaatttcacactgattaaaataaaattctatcaatctattgattttattacacatattaggtaaaacaaaatagaactaaaattcctccagttccccttcaaaaaaataatttaaatacacttagatagcagccaaatgaagagcatcatattttcaaacaagtgacatcacaagcaataatttttcccacatcagaatttgggtacttaaatcatttcttaggcaacattgtttttattttttatcatttttatttgaattacaaacaagattgatttcatgacaatcccagttcccttctccctctcttcctcccctaccaccccccaactaaaaccctacctatcacataccctatcttctattcttcacctgactaaaactttccgatccctcatgacctctgcatccttcctcttcttcccttctcattcttatagctccctccctcctcttcccatgctctcaatttgctcaggggatggtgaccctttccccttctccaggggacaatgtttgtctcttttagggccctcgttgtttactactttctcttgcagtgtgcattgtaggctggtaatcctttaatctatgtctaaaaaccacatatgagtgagtacatgtttgtctttttgtgattgggttacctcgctcagaatggtttcttctagttccatccatttgcctgcataaataaattaaaataaaataaaatataaaaaacactgactaccaaaacaaaaaacagaaaacaaaaaaacaaaaaaaagaaggtcactcccgaatagtaaaagtttaagaagtcctgtcttaaacagtagagacacctttttccacttttctgcctgttagaaatccaagatcaagatataagtgaagtttcttattcccagtcctcattctgtggcccacaagtccccgtcttctcctggcattttcacatgatcctcagtttttagccatctgtgccctaatctatgtttcctacacaggccatattggataatttctatcatggtgacctcaattttaatcctttcttttgatagctctatctacaaacactctctgaggtactagaaattagaacctcacactcacattctcaggtactatagaaaacagaacctcagcatgtatttttttgtagaacacatttcaacccacaccatcagacaaaatctcaagaataatcccccacagattttcatagcccctgcaaagggtaggaaataaagcatgactgagatgtactgtttgaaatagtgacctttccagtgatgaaaacaaacattttaggtcttgatatgaatcacaattcttggctcacaaatgcaaatgtatggctctgttcatacttgtcttctgtacataagcagatcttaagtagtctcccagtgaatgccatagtatgttaacaccatgagtgatgtcacatcattttcaatattggagcaaagttcatgccacagtgaaatgttttctttagtatttgattcttcattcatcataatagatttagatgttataacagacctctttaacttagcagtgcaaaggaattcaccaactacctacatagttctcgtgccattcagagtacacacttagagtctgtcaaaagaatactaatttgccattttccctctgtctttctgtaccttggagtaccaatggccctgaactttagcttaaataatacaataatataaactcagttcaccctgaacaatccttggctttctataactacctcttacactgggattgccttcacactgttacatataagatgacttttaagttctcagtcgtttgtaactatttttaaaatctcaagcctctaagcatggcaccttttgcaaatttcacaatggtaaagtttgcttaggggatggcacagaagagtgagcaagagaatgcaagagctggaatagaaggaagggagctgtgcaaagctgactccaggatgtgacatagctgctgcacacagcaactcacagcagctgtagttagctgcacaagacctgcacattatcacaccagtcaaaatcccaacacgaaagggggaggggcccccaaagtcccaccctccgcaaagacgtattgacaatagatgtttgctgagggagggtgagtcatgtctcctttggggacatgactgctactgagttacccatatctccgtggactgtccctacccatgctgcctatggacagcagcagctgcactcagggatctctccatagcaaaaacaaaaacgaaaacaaggacatgaagctgggaggaagacgtggtgaggctggagacggaggaaaataatgatgaatagatataatcaaaatgttgtattaacatacaaaacctgcaaagaataaaga

SEQ ID NO: 18 - DNA, 88999 bp, Cricetulus griseus
  >scaffold_10 dna:scaffold scaffold:CHOK1GS_HDv1:scaffold_10:61021765:61110763:1
  misc_feature 17132..17231: /note="n is unknown"
  misc_feature 48131..48230: /note="n is unknown"
  misc_feature 64639..64738: /note="n is unknown"
agccaccagggggcccttggctagtcaaaaaagcttgggtcatggatctccaaattggcccttggactagaagactggtggccaaactaggctagcgtcacagaacctctagcttaattgtgggttcccaaattgagatagcgtagccctgagataatatatatttcgaaaatcattgaccacactgaggaccaagcagaagatgttgagttgaagaaagtaagcatctatggaaaatgggaaaattaaaaaaacaaattccaagatttatctgtctcctagtaacactaatagtacatcacataattagatgtgtttttgaacaatagaattctgtggtgaaataaactctcaaacacagtgcagactcactctggagatttgcaaagcactctcccagaatgaaggctccaagaagtttcataaaatcaattatttcaaactcttcatcttacgtaccacagacctttccctgaaggaacatttggagatacatgcccacccatccatcatctcactttggggagcgctgtgtcatgcttgaagaaactcttggggtccggcctgtgtgttactcatctttctatcttctggtcttagatggggtttatgtatagtgagtagtacctagctgcgtaagagaccaggtgataattccagagagctggtggcaggacgaaatattcctgaagtctgtcagaaaggagcattatactggactaaatcaatatcatttgatttgtaaaatgcaatctgtctgtcacggctatgaggacagggttacctcactttatcctcccagatctagtccatgcttccactgccttgttgtcataagagcccagcccataatcacacaaggacttccctttttaaagtcacttagctatgaaccttttgaagaacaggcactcctgttgcatgaaagatactttctagagccctggactacccaaccaacatcaaagatagacaaaaacccagttcaccactagcatagaatgtctgggagtttgaccttgtaactctgcccatgattcaaacatttgcctctagtaactttctaggaccccctaggaagagtctgtctagctttgatgttggctgtgtgcaccaaacacaattacttatcagccctataccatgttttaatttctcaaattttcttgcttatttaacaaaccttattgcccactctgggtgtcaggtactgcaacatatcaacaaatgctacatgaagaccctgattgtcaggtattgcttcccaagaagcagatggacgattgtcaataaataccagattgtcggttgtaacaaagggtggtgagtcccaaaaaagggtgtaatggcaagtctttcagccagccgcccaagttccaccagtcacgtgggtggccaaagtgacacacagagacttatattaggtacaatgctgctggccaatgactaggatttcttatctgctagctcagtcttatttatcaaccatagtcattaatctatatatttataaagacttatagaggacggcggccttgccgcctgtcttcttggtactacatggcaactcctgtctctactacatttcccagaatcctccccgactcctagtcccacctaacttgctcccccattggccaacagtgctctattcaacaaccaataagatagacatacacagaaggaccgcccccatcagaagggcataggaggaaaagtaaggtgagggcctcctgcctgcccaccacactttaccttgagctatcacttaggagatgagcaaaaggctatagatgaagaaatcagttcagtcagccgcacctccaggaggaaaaatcatactgttaaaatataataatctgaataggaggacacttcagaaacactatggaggaagagataggagcagggagtctgacggtctttggtcgaatgtaactcacccttgcggtaactgaaggaggctttgtagtccatagctacccaggagaaggacaaggtcccaccacacgaaacagtcaggagcaggctgctgcagctgtgcaggtgattatcatcacaactaaccaggcagaaaagtggctggtcattaggagcccctcgggctgcatgaggcagcagcatgaggcagccctcgccttatctagtactcccaccctttgggtcacaagcatctgtgattttagaaaactgtagatagtttcaactcgtatctcaaaacttgtcagatttcaaatgatctcaggctcaggactggacatgtccagtaacctctggcctgaccttttctctggaacttcaaatgtccttgggccagaggtaaaaggcctggtgcaaccacccgcccctccaccgcccaaaaaaagctatggggcaatttgacatcgaccagttcgttattctgtttcccaaactgcagtggcagctaccctaggagctcacaggggttctgtggatttccttagatttttcaagagaaagctaaagcttggcacatgttgggcactgccagcttctaggccaagatgatttgcagtttctgtactgtaattgtactgccttgttatttatggtaactttatctttgaaagggggggcttctcagtttctaggatgaaaagcaaatatctaatatataaaaaagcaaacttagcaacaaacagaaataggaatattggttccagtcggatctcaagctttgtgaattatatgcattgtgtacccaataggaaagcacaatgcattaataactaattggggttaaataaaaaccttatttctttccaatattttgcattaacctcctagctcctgagctgttaaaagatagtgtgtaggctgtaactatttagcaaacttatccattaatacttgaaccttcatgcctactaagtattgttcatgatactggaaggtctacacatgctaccagaggatgaaaggtgaacggccaccttctggtatacaagggtgacccgtatgatacaacagcagcataagagctgtaggagtcaccaagcgctatcagattggatttaagggccactccatgagctggagctcactcccaccactgctcagatggctgaaaatctgagaatagataggccatgaagttagagaaaaaccaaatactgttgttctgctaaaggaaaacaaaatgattcctaatacattctgctatactcttagatcagtgtctaggtcagtcgtcatcaaagaaccttcctcctcagcagacggaaactaatacagagacccacattggacaatgggcaaaaattgagagaccttgaaataatcagtcctaaatgggatcagggaactctgcagaagaggagacagaaagattgtaagagccaatggggatggacgacatgaaggaagccatgtcttcttctagatagaacgggccccatgcacatacgaactcacagactgtggcaccacacacagggcccgcacgatccaaggcagtcagggtcacagctctgaaatgtggaggtggacacagcgcttgcccccaacaaagaatttatctccaattaacaactacttgtaaaggaaaaattcatttctccaaaggagtctcatgagtagacaaaccaccctatggcaaggacccacgaccagcagtagacggcctacacaaaagaaactcagaggtgtttgtgaagatattttgtctcatggtgctttctttagatttcctttttttgtgtgtaatatggttgctgattttgaattgttaatgaatcgtgtgtgtgtgtgtgtgtgtgtgtgtgtgtgtgtgtatgtgtgtgtgtgtgtggtatatacagaaacatgtgtgtttctcgtgctctttcttagatttttgttcctttttgtcactttgttcacttagttttattcttgtttgtttgccttttttatttgcctgtttgatttcttaagagagagagagagaaagctgggcgttggtggccagcctggtccccagagtgagtgccaggataggctccaaagctacacagagaaaccctgtctcgaaaaaccaaaagagacagagacagacagacagacagagagagagagagagagagagagagagagagagagagagagagagagagaggaagaagacttggggttggaagaatagggagattggggaggatctaggagatgagggaggggaaccttgaccagaatatatcatatgaaaatatgttttaaatgtgtgcattattggatgtttctgtttgcctaggaatatggtgagaacacaacaggaaacaggagttccatgagctaagccagtgtggaaattcccacctcctgcctctgctcatcttactgtttccttcttatcaaatagcaacttcctattcatgaaaatctcaggaaggttctagagctcctgctaatggaagccacatcagtgggtggaactaaagtatcctcatccctggggtctgccatgttctttgtgggggatttctcacacattggttcctttacacaccctatgcaatttacttagttttgttttcctcaacccagaaaagaaaaaatgctattcctaattttcttcagagtcctctacccctggatttattagacaaaatttaggatctagttaacatttcttatgaaaaatttgataactttttctgacaattagaaaaccacttttctgttcctcttgtgctttcaaaaaacccacacattaaaaagaaaaacacagcatttatatagaatgtagactttctttataattttaaaggaaaattgatcagggctggagagatagctcagaagttaagagcattagctgctcttccagaggtgcagagttcaattcctagcacccacatggcagctcacaactgtctgtagttccagctccaggaggcctgacaccctcacacagacatagattcaggcaaaacagcaatgtacataaaataaaagcaaatcacaacacaaagaaattaaaatttaaaaagaaaaatgatcaaataaaatttattcagtgaaatgtccatactacacattataaaggataaaagctattaaatgcatgttttcccccttaaaggacttccatcctggtttatacaatcaaaggaaataaaaaatagtgtatgacaaaggagtaaatggggagggacatgctagaaacgtcacattgaaagaggacggagcctccagttgaatagccacagaaaccccagccttaccctcgctgtgagcaccacccactttctcaatggcttctcttctggtatgtcacacacttccatatgctctgggcctgtgctttccactcataggaaatcttgacttttctaggtcatcttagtctctattgctgtgataaaagcacctggaggagtcttataggcttacacatctcacctcagctcatcactgtgggaagctaaggcagcaagcaacctggagggaagaactgaagccgatatcttggaggattgcttagtttgctttctcttacacaccccaggaccaccattcgggaggtggtaccacccacagtggactgggctctcctacatcaatcatgaatcaagaagatttgccacagccttgcctgcaagtgcatctcagggaggcatggtttcagttgggagtccctcttctcagttgactctagcttgtgtcaagctgacataaagctaacagggacattctggaacaaacaaggttttccttgcttgaaaaacttgctgactctgttttgcccaccagagaaggtgcattctccatgcaatgtgcctcttagctttgctatcacctctgcgttccttctacccacactttataaaacacatgtgcacatggtgtgcgtgcacacacacacacatgcacgtgtgcacacacacacaatatatatatatatatatatatatatatatgcacatatacagacacatgtatacatatatgcatatatatgtatatatatgtatatatatatatatatataatatttcatttgtagtgagtacccaagataggtataggtatatcatactaaatttatgaacagtgtattatataaaatttatggatactcaaagaactatgctacttatcttcctgtctttctatacacacaattattacatactagatacatcacctctgtggcatctccatcaattctttggtttcccactggtgccgtttcaagtttgtccatttgtctactccacgcctacttattgcctgttcaacaactgtcagtagttgctcacctcctgcattagtgactgttcggacactgcaataaaatgcaaccacaagcaacatagggaggaacaggatttattttagcttgcggttccagagggataaaggccgtcatggtggccagcaaagcagggcagcaggggcaggaagctagatgattacatcttcatccacacaccgggagcagagagagagagagagagagagagagagagagagagagagagagagagaacgggaagtttgggcaggcgataaaccctcaatgcctgttcggctcggatgtacaccttcttgcaaggcttcatagggtccttagcctcgccgcacagtgacacatgtatcattcaaactactgcccttccaagatcagagagaaatggagtgcatgagaggagtgcctttcaacaaaagaaaaactcactcagccaaaaagtgtttgtcaaagaattgtagcaagagacaaggtgaagataagtgatttctgggacattccagtgaggacctggaggtccagaggtcagacaagtgtcactatgtccagtgatcatgttgaattattataaagttggtttctctaccattctcgtatttacatggacatggtgatctaaaactcgttgctgtttagaactgctattggacaaatcaaaggtatctttgtgttcttactttggacacaatcttttcttctttagggctggtaagggaacctgatgtgggtgaggcaagctctctactgctgagatatagcctcagcccttgtttttctgtttagtgatagcatcctgctatgtagcccaggctggccttgaactcataatatcctgcatctgcatgttgagattacaggcaggtgctagccactatgccctcacacatctggatatgttttgtttttcttttctgctttttccttaacatatgacatcagtaaagattaactatcttttcccatatcacttctgtctctttacacacttccaagaaactgacgttataaaaaggaaggaagaaggaaaaagaagtagtggggagaagggaaatttggcttgattctatagtgcattggaataatcggtttgtccctttaatacacactgtcattgatcacctcatgtgccaggcacatagtcatcagatacacgagagaacttgctgacttctgatgctcacaagctgacagggaggtaaacctgaaataagaactaaccagactaatgtatcaccactctccatagcaagagcaaaggagtgaacaacatctgtacagtcttgctgtttgaagagtagtcgtggacaggcgcactcacctgggagcttgttagaaaatcagaatctcagtatccacccaggaactccggagactggatctgcattttaacaagatctcttggggattttcatgctccgtagaatttgagaagtgtggctctctggttcacagggctgtgggagaaaacaacaggttgacctaagttcagcctgtgggtcagggaaggattccctgaaaaaatggactctgattaggccagggaggcaaaggctccatggaatctttgaagacaggtggagaacttaggtctttttcccctaagagcaattcaaagattatatatgtaaatacatatgttatatatgtttatactatgtgtcccttgtgtgtatgtttgtgtgtagggtgtgtgtctgtgcatgcatacggtgtgtgtgtgtgtgtgtgtgtgtgtgtgtgtgtgcgtgacaagcatttgggtgtgtgaatgttgtagcatgcatgcggatgcctgaggataacttggattgtcagtcttctcctgtctttttgagacagtgtctcttgctgtttgctgttgtgtattactcgctagctggccccctagcttctcctattctcactcaccatctagtcctaggtttgaagatgcagtgccacagttgactttacaggaactcagtggagcccaacttaggactgctgccataaaaaaccccataaagtccatagttatacaacaggaatgtacttttctcccaactgagcgctggagctctgagagaagggtacacgtatggtctgcatctgttgaggattctcctcctggcctgcagaagcagatctcactgtggcttctcaagggagaaagaaagaaagaaagaaagaaagaaagaaagaaagaaagaaagaaagaaagaaagaaagaaagaagaaaggaaggaagaaaagaaaagaaaagaaaagaaaagaagaaggagaaggagaaagaaaggaagaaagaagaaagacaaacgcctcttcctggtatcactttttataaaaacaggaatatctacaagaagatcccatccccatgacctcacctacccaagtgacccatctctatatatcattccttcaaggttagctcttcagcatcttcgggtagcaggtgtgaacaattcagtccctattaaagttttaagcaaagaataagaaaaacaagattgcttttaaaatgccactcctctggatgaagtattctgtaaggcttgaagggggtcaagaacatattcacagccaggactgacggtacaggtctgtaaccccagatacttgggaggttgaggacataggggcacaattcaaggcctacttggaccgcagagtatgtcacccatagcctgaacaacatagtaaaatcatttctcaaatgtttagaaaggcaaggactgggatgtaacttggtggtccacactgtgggcagagccctaagtttgtaggacatcatagattcagagagagggagtgtgtgggagggggagagagataggagaagaagtggagtagaagtggagagagagagagagagagagagagagagagagagagagagagagagagagaagacaacactcaggggagcaactattatttcaagagttaaggcaaaggatgtcagatgtcagtcacctggacaaagggacacgggcagagaaggaacaaagtaaaatgttctaaatattcagtcattaaacttgacaggctttgacaatgcatttcaagttgtggttggggaggaaagccaagaaaaagtgccaggtttttggcttgtacaaatgagtaagtatgatgtcatttcttgtgacacaaataatcagcatgtttgtgtgtagcgtcttgtccaacacagaaattactgtaaggagagccatcatgtggcaccagtctttgtatagatgttttatgtatcttctcttaattaatgtaggacacagaccttgccttctgaaatggcaagatcaactcaggcgagctagctatacaaggctgcattgttaagtgcttaaaatagactggtacaatgaacagcacagaaggccctttgaacatcagagaagccaatgtggatgaggacagcaggactgtagcaattgcaggtgagccgaggtctacacacttggtaaggaacaaagaaacatgaggtagagagaaggaacggccctttaggaagacagtggaggtaaagttggctataaaggcgggagccacattttgcaggaccttgaaagtctgtaatttggattttatggagggacaggtttgagtataaaaggaacatgactttacatgacttcagaaaaacctgtctggcaacagggaagaccggagctgaagagccttgaatcccagaggccaccaattagctcttgtatcatatggggaataggtcagagctctggcctagcttggaggaaaaatctaagagtcttcatttccttgagtgagaatgggggcaaatgggggctaaagtttaaggaataaggttaggagactggggatttcatgtcagaagcaagaggagatgggaagaggataattttaagtttgaggacacactggccaggtgtgtgtcgttagtgtgctgatactgtaaaagaatctccacctgtttgaatggacctactttaaattttcagaaaacaaacgaaaacaaaacagactcaaccacaacctacaaataatgatattgactggaaatgagagtatgaagcattaaagcggaataagacatgaggtctagtagagaaaattagtccacaaacaagaaatgctgtgttttaaggatgcaagtgcgaaattaaaaaacaaaacgaaatcattacatcatcctgttgctctattgtggacgatgcattaaacaggtgcttacaaaaagaacagagttaggttcaatctttgttcttgcctggagttagtcacaggacatcatacttaattttcaagatccgaaatgttgtgttttgtggaaggaaatgtgtgcttattgtgtttctaaatgccatatgtttttgtttttgttttcaaagcatgaagaaatgctattgactgggggtgggggataaccctttccatccgccccccggccctcgccttctctcgggggaatcccagcatcttctgggtcgtcttctgtaggccaagaccagaggatgccccttagtccagctgctcgtgtgcacagcagtaaaacgccttccggcaggtgtggctgcattagtgacactgtgggccagggaacgagtgttcaccaaacggcatctaagaaggttacagcacacctaatcctctggtgggtgccaggcagcagcctcaaagcttaatgtacagatgccaaatgaagtcattaaggcccctgatgctttggacacacagatggaagatacacgggttccaggaagtaaccactgcaatggcagctgttctgtgtgctggggctgcaagcatgtgctgatcttgaatgtgtgctcggacttggttacagccttcctgggtcatggaacacgcctgtatatgtttggtgaggtattactttccatggcaaacgttgtattattaatatatattatatataatctatcaatcaatcatctatctatagtctatcatctatcaatcatctatctatctatctatctatctatctatctatctatctatctatctatcatctatctatctatatccgcatgctttgtcaaagtcgtaagggctccactttggggtgcaactgcatctcctggccaccttaggagacacttcccggaatgttgacgttgctctggggctgtctgtctggaagcgtgtttgtctgagctgcccctctctgtgctctgccaatagcgagccgctcgcccgctcgcccgctggcccgccggtccgccggctcgccggctcaggctcgctgctgagactgccttctggggagagggagatcccttttccatcagtatggacgcactgttttcagacccagcctgcgcggtgttgctgtgtcagtcatcctatggggaccagtttcagacgaggagggctgacgagctggcccgcgattggcccgcagcgcctgggcggggcctgcggggaggaagggctgcagctcacagcaacagagtttagacccgtctttgcttcatcatctgaaggtaaaaaattttccagcctccgccggcggctcgcagagtacaataaacagggacgcagaactgtttgcatggacctcgctcgctcatgatgcggtggagaagccgcggccactcggtgctgccggatgctctcggggccactgtccatggggaggacgagcagagctgaacaaggtaggaggacaccctcttttttcttttttctttctctctctctctttaatgtttagagtttgctgcaggattgctgcattccgagtgtgggctgagggaaagccagggagacgcgcattccacgaattcgaacggaatactcgcaggaaaccctggagtttttacgtaacgtttgggtttgagaacaagaaatggcaaggctggaaaatctacgccgccccgtttgggtgaggcatataaaaccgagggtttatttatttatttatttatttatttatttaaagaacagacacgtttatgattgtgtttttgtttttgtttttgttttttaattatctgagagatccaggctaatattttcttaaagaatgtttttgctgctgtggtgagcttacagaataaagtttacatggatcctattcttggaaaacacacttgaaattaagaattaaaaaaaaaaacctcatggtaaataatcatcggttgaacgttcgggaccaaaacctgtctgtttcttagaaattgggggccaccctggtgccacagggcaatggctttaattgagtttcagaagcacattttaaccaccaagccggaggcagcttcctggctggtcttagacactgtagttcggtgtttacattgcttttcctggcagcctccgtctttgtttccagcttaaaagtgggaccattatattcaaaagtggagctgggttaataacgcttaccgcaattatctgacctgtatgcatttttaatgagaacacacagccagcagaataatttagcaagagcaggctggcgtttaaacctgggctctcactatgcccggccagatcaactttcttgccgggaagcagtggctagaaaggttggagcagatttatttttaacacacttggctcaaggagaaggaaaggatctctgtgttaaagaattctttctgcccttttccgttttaaatttctgccaggcatgaggaaaccatgctttttttgttaggctttggaagcatgtgtttacaataaatgtgtaacatttttagaatagttagcaagcactgaagcagaggagaaaaagaaaaaaaaaaaaaacaaaaaacttgcctaaccaccacccccgtgagtgttccaatggctcttctaaaagccttactgtccctttaaaagacaaagattcagtaggaaaatatctattaggacatgtgtgtatttaggagacaacgaggaacaaaaattaaaaacaggagacattttttttacaatctgcataaggggaaatttcttcctctgcactccgagggacaggaagtctcatgtaaaaggagggcagtgccacgtagattcttctagacccactgtttctactttcaaggagaagtgcaggacactagcccagaactcctgacgtcatcccccaactatttctgctgtgtgttctttgattcggctcgtggagaggaatatttctctgtgtccaggccaggaacattcacactcccagttggcaggacttgagttatgtcttcccatttaaaccacagcctgtccttcccccttctcaggccaaatagggtggcttctcctacctgcctgtcttcgaaggttttctgcagacttctggcttggctagagaaaaaccatggggagccttggggagctgaatgccactttgtctttctggcctaagtcttccatggtgcagctctgtaaggctacctatgtggaccatccctgggggggggggtcccattcccagctgccctggagtcatcaactaaggcccaggatatgccatcaagttcaaggttgcttggacggtggttgacagctgctcccataggtaaagagcactgtgtcctagggcagatggctcaaaggaaattaagacaatagtgcctgctgttaaccctgggtcacaggtggtccccgtgacacccttgattgtaaggatcaggggaaaggttggtgtttaattgagttgcctttaaaggaaagaatttgggttagaggacactgcagttcccaagagtccctgctatcagcccagcctcctctttcccaccacgtggccttgagtaagtacctgcctcagtttctttcttgtcgtagaacatgtaatgcttaccacagtgtctcttattttagaattctagggacccggtttgtacaaacaacgataacaaaagttgtttgtctcttggtactctgagctgtgtaaagtacaaagggaagaaacctctgtgtggagacattcattggcaatgtctttggggtgttaccacaaataggaaacccttcagtctctagcaatttcatataaattttctaacgacgtgtgtgcctaaaccaacaaatgaaatttccaagtatggtcgtttgaattttctccatccatttggtctaatgctccagcagctgggagagccagcctcttccaacagtgggcaccgtagtgccgttgtgcccaaagcgtccagtgctatttttactttgacttgtgtatggaatttgtgaaagtgaagtgaatacaagagaaaactgggtggaagggagaaagcttgtgaaatacactagccgtgtagctttactgcttagcagcctgccttccctttgctcgttgttttaatttgctgttgccatggtgaaaacaaatcagtatcacatggctcccagccagtcccgcgctcagggagcgccatagaaatccaagagcaggtactcgggatttcaagcaggaatcggacaagaggatttagagactgagcgtaaagagaattcctcttgtaggagttgggtcaaccgccacacacgttctcttcttctcttcttgcattctcttaccagcaaggaaaaaaaaatgtgggaggaaaagcagactgacatgtttatgtttccaaaataacaaaacggtagctgtgcggaagtgggtagaggacaccgaggtgggtgaggagttctagttattgaagagacgatccagggacgagagaggtagtggctgtggagaacatagttcaggctccttcagcacctccacagaaagctatccctgagaggccataacagcagctactggcttgtcagacagagagtgagcaaagagggagcaggcagctatggtgagaggacagtgggcaggagtctccatcacgacagatctgcaggtcaaaagtcagtcaggtgagcacagaagagccccaaggtcatgaccccacagagaacaggaccgtttttccttctgacggaagctgcagcggcccagcctgaagccttgtaaggcgagcagggaagagacttcagaaaacaaatgaagggtcaggaacccaggcttccttcctgggaagagccacccagacagatacatgctctgctgtgtggggctgggaacttggtatctctgctttggaagggctctgccaatcagttacagtactgttgttgtttcttccagaattttagtcaatccagtttttgttttctttcttgaaaatgtgtgcaaagtgtcccttgcagctagagcagtagtcttggtggggagtcaaaggtgattcctgcagtgtttgcttcaggcctgggcctccaagggctgggcttcctcatcgctaggccccacctccactggggcacttagtaaaaacaggtgtgtggggtgaggctccagctttcttgcggagcctgagccccaggctggtggacagttttcatcaggcctcctatcactccccctcaatatgacaaaacgtcttggacccaacaatgtactccagtgttttgagaaagaagtcattgtctgaggtctcctgggtcggctattccatcaaccagtcaacaagtgtttgttaaatgccctttgggcaggctcttgcctttggttagaacacaagttaccaggtgcccgcctttacatttaagtccaagcacacctgttgtaaaatcccaaatctcaaaggttttaaatagtcactattagcttatattaagttagcatcgttaatcatcagacattggttttaatctagacatgattctggtgtttagaagcagaacaaaacagactttcttttaaaagatttttagattttagatatctctatttagacagctctattttcttcacctctacggtatttcttaccaacagtgttgtatgattagcataaagggagatgagccatggtttcggggtgctggaaacatccagaatagatggctattgagagcctgcagtggcgagggaccagggcacatcgcttatgaagccagaacaaaaggaaatcttagaccctctcccagttctgagctgctgcctgcccccaacagcccatgctgcaattatgaggaaacccgatgctgatgctgcctctgggggattagacttccccacattctttcctaaacgcagggttggtttcttgttttgttttgttttttgttttgttttgtttttagctgatttccccctctttaagttgttttgatggtggtagattgggggattttgcccctgaacatccttcctttggacgaagacaaactatgtggttagcacagagctgagagagaagtctcaaagggcagcctctgcttttaaagcatcagccctggatctccactgatgaaggagctgggcccaggttaggagcacccatggcaagctggctgttgaagatctgtagggtgtgaagtcaccttagtggaaacaggagagactgtgggatgccctataacatggcaagtttctttcctgagctgtctgcaatgcacagaagctaggaaagcagatccttacaaacaagataagagcaaagcacagcttgtcctcagaagaatgaacggatgtgggggctccttgcacttgacaaggccttttgctggcattatctccattaacggcccaaatggtgaggtaaaggtgggaacctggattagcactctctgggcacaattccaggagatgagttactactagatttaaaaacttttacttgttagaggactggggaatgtatcccagttggtagagtgcttgccaggcatacttgaagccttggatcaattgttacttagtaccaccgaaaaccaggcacagtggagcacatttgtaatcctagcactcaagaactttaggcaggagggtcagaagttcagagtcatgctgtgttacatagtgacttctagaccagcctcgggtgtatggtgtgtgtgtctgtgtgtgtgtgtctgtgtgtgtgtnnnnnnnnnnnnnnnnnnnnnnnnnnnnnnnnnnnnnnnnnnnnnnnnnnnnnnnnnnnnnnnnnnnnnnnnnnnnnnnnnnnnnnnnnnnnnnnnnnnnaccagtcacacagcagtgaggtattctagaattcatagttgcaaatgtgctgtgtgccagagactaccaaagtcaacagtgatagcaatgtcacagccttctgtacctctgagggtatctcatcccttaaactggtggaaagatggggtgttccttcaggggcattccttacaagcaagatgccttacacatatctactgcctttggagatttggaagattaccagagccccaccagatcaacagtgctccctgcccaatggtagttagaaatctgaagacttggtaacagccgcatcatagcaaaagctgtgatgtaaactaaggcttctgagactcccacgtcctataggtagctaggattgtaggttttcagctgaataaataaaagagagatgaaagtaaacgactttcagatagaactgaagtctcaaggtagaaagatgaattgttgcagaaatctccgttgtagttagtctccaccctagtaaattcggagtgatagctgtggctgcatcttacatgtatatgctatttcagattttatgtttatcatctcctcaagtgatcagaaccatcacttcctgtttagcagattaaattcgaacaggatttgagtgaggttgaatcatatactacaagttttagtagccccaaagtgggaacattagcccttaagccaatggaaatttacctctatgatacttaacgagccaaatgagtcacactgtggtctaacttgaagcttttgtgagcagagaccaaccctagcaatttggagaggatagcaatgtttttaattaagagattgaattatcctttaaaaaatctataaatttctggcatcctaaatgcaagcttcaattaatcaaactaaaaatattagggaagtgcatatgatatagatgattaatacaattttaacgttctgagaattggggaaagaagagctgtgtttgggtcagaaggtagacaggatttcatggaagaagggctaccttccttggctctaaatgcaagcattctgtctacatcagcctttctaatgtggaaagtctataccctaggccaaggataagattatttattagtaaggggagagctcgacttatatattattagtgtattactttaaactgtcaattttcatgtgtgtttgatgatgaatagatcatattggcattgttattaaggaactattacgatggtcgtttctgattttaaaacatattttataataggagtgtatgatcaaaaagcatggggagcccttgggtcaacagctcagggtggagaaacagtggtgagggtaagggaccctgggagctggactttgcaccatggggagttagtgttggggtaatgggtaatcaggctacatgagggggggggtcagaaccaatagggtagagctgaagagccatacagcagagtttaattttagcctacatgtaacacttcccgaaaattctactgggctttaagatagggttagaggttagaacatttgtcacgagtgatgccattggacaaaaattttacagtattccaggcataatgtcaggaagaggtggatgaaagtggaggagaagatccaaagtgtgccataacagaaaagtaagagaagctggccagagctcagagaagcctgaaatgcattagtttctgtcatgagagacactgaggtgccatgattgaaagtcgggtagagagagatcgagagactagccaacgggagcagaaagttggtgggctgtgagcttccagtggggggtactttcagccagtaataggatatgtctgtagagttatcttatagatacttgacagagagggaaagggatggggaacagccaaggccctggactaccgctttctaagcccaagacagctgttttgaaactgtagttgatgaatgtcacggatgctccctaccacacagaatgagggaacataaagagaaagagacaattgaccaatggtgagccttgaaaaagttagctggtggcccagaactaacaaaggaactaatacacataaaagagaaaaatagtttttaaaaaataaataagcaaaactcttgaggatcatatcctaatctccttgaatccataagaatcatttgtttacttttcttgttgctgggcaaaatacagaatggaaacggctgacggaaggaaggcttatttgggctcacagtttgagggtaaagtcctccagggcagggaagccagggcggcagggctccagggagttgactgcattacacccacagtcaggaatggaaaagatgctttctgaggatgccctagtcctcggaatggtgctgtccacagttagggcgggtcttctcatctcaactcacgccatctcaaaactccctcttagccatgcccagaagtttgttgccatggtaattccaaatcccatccagctggcaatcacaattaatgatcacatgtactttaccctctttagcaagagtctctgtcaaggatcctgttggaggcaaacattggttcacggtcatgtctaaagccacagaacagtgtgtaagagaacatgcctagctgcatctcccatatgcataggtggtgtgagacatagattttcagaggtagggcatttaaaagcaaaattatcaagacttttgcatctgcgtttttcaaaatgtgtattttcaggaggtcactagttagaatgatgattccaaagagaagtgtcgccagacactgggtgtcttgtttctcctgggtctcccaggtctcccttgaacccagccataaggactgtttggaagcaaattctcaggatgagaacgtgtttggtgtggttggcgccctcttgccaaaagcctctaaggactaaaccagagcagtacagctccagcttccttgtgcctgcaggtcacctggggatcttattaaggacgcagattccgattcagtaggtctgggagtgggggtggggctaagactctgcttttctaacgagcctctcgaggatgaagatgatggtattgctcggcctactcactggggagcacctggaacactagggcagctgatgggtctgctggggtggcttgcctgaagagcccatgttgggtagaggccaacacccgttagcctggacagtttctgcagggtgctgagtctcgcttagaggtcgggtcacactgatatatcaccttccagtcttatgctagcccagctaggcctgagagttgaaggcagggggacagcagtgacaagcatctgtggctacacagagctcatctgcagacatctcccatgcaagatgtctatggtcactgtggacacagactcacaacttgcacaaggagtttggtcaccaccccaggcaaggcctctggatctatgtatctgcctcaagagatctttttgttttttcttccctaagaaacacatgcattggaaatcagccttgagtaacccctactttttcttttttcttcctaggcgggatgtatttaaagtcccaaagcctagtgtgcccacctcatatgttgaacactcggtgaatgagtttggggaattctgccagtctcactcattgcgccttaagctagagagatcatcttcctctcctcgtcctctccaaagggtgtgatgatgagtcagtgccgccagcatggcgtgtctgaccgccacattcacgtacagcctataatgaagacatcatcagatcacacaagggaaagtccaggcctgagtacagatcttatatgttgttatgtctcatgccttgtgcccctgccaggcctcccttctcaggggtacttcctctttcccagtctccagcaagactctccctttcctggagccaagaatggatctaaactgatttaggggactctttcctgcccgattgcctatttagtacatgcatagatgggtgggggtagggcgtgctttgtaattgaccagtaaccttttaagaatgaaacagagcaaatgtttatcgagcttattgagtgcctaacatacagcggacttctgtcagagtggtgtctgtcaattccattaaaatgttttatgaagaaagtgagacacagggagagagttatctgccagagtcacaagctaatcagaagcagaacaaaggtgagacacaccttggcaggatccaacacctcaggcaaggaagcccttggggcttgcaaaaggggggcttgcttaggaaaaatgtccatggtacacctactccctgtggacttaaacagaacagacaaaaagccattgctggtgtactctgcagacaggaagtcattttttagtcaggggacatttttcacaaaggaacttggttaagtaccaggtcatggccagggaattatcttcattatttgatgagaattagctggccttttgttacttttcagctatgtgtgtgtgtgagagagagagagatggggggtagagagagagagatggggagagagagagagagagagagagagagagagagagagagagagagagagagagagagagagaagtattcaaatctgaggagttttgtgctgttttgacattgctatctgagagaattcctagaaacatgtttgtgtgtgtggtgagggtattggggatggaacccagctctttgctcacactaggcaaacccactgagctatatatcctgttctttctctactttcagttttgagacaaggtcttgctaaagtgtccagtctggtctcgagtttgtaatctttctgccccacctatgccacctggccaggaacactcttcatttccagttcccctccctgcacagtgtgtttccgtgtttcctgtgtttcctgcaggaagttccatcctccaccaagggcgtacacacacacacacacacacacaaacacacacacccgtgtagatgctctggggcatctgtggtctgctctgcctgttgctatgctaagctgtggtctcctttctcctgctgattgtcccgcccaagtctgctcctagcttccctaccaagtggccaccataaatttaggattcctgggtatctcttcagatctggtgctcggatgagaggcaggatgcattcctgtttaggaaacccatgacttgagccctggagtgccagcttcctggcagccaccacaaagaccatccccacaggaaacaaaacaagccctatctctcaagtctccctatttcttctctttaaagttccctggtacaactaagctgcaattaagaggcaggatcaaaggggcctgctgcctccgtgtctgcaggggccattggacagctctggtctattttttaactatttacttcccacgggttatactccagctgctgccagcctgctctgggtgctcaggcaccaggacagggaagggcttgggagacgattaaaatggggcagcactttccctgccattcagatgaaaaccagaaggctgcccccagtggaaaagttcctgagtgacaagcgatgatctggtgccggtcatagccagcctgtcccagagctctaacaagcagtttctaaggattgcagctagtgtagaccagcacaaccccagatgcacataaaccacaatgtttgcttaggaaattcttccctgtgtggctcccatcaccttcaatgcccaccctgttcttcctaagcagcccacatgtctccacaccaggccagtcctttgcctagtggaggctgtaagccgtggatagggtcattgcagcacctctattatttaggatataatattttcatttatgcagccccgggacacacaccacattattctggcaattttagcccatggttaatccctgtggaatattgaaccagcagagatggagaaagggttgggcaccatttctcctcggctctgctcaggtttggatacgtgggaagagcgggcagatagtccacaagactttaaaaccatcgtcttctatccactattgtgccgccgctgcctctggagacatctgctagcatgctggacattggtctaaaaatgatagatggacagctggcaaagacgtagatggtatacacgtagagagagaggggggagggggagggatggagagagggaggctgtgtcatgtggtgggaagaccacaccgagtggcttttcaaagctggagtgcagattttgggttgcccttcactttgtatttgcatttctccccctgttccacccacatggccattatttcagcagcagtgcccagtcctgagctgtggtcctcttccttagacactcaaagacccattgcaccatcagtaggcgccaaggtcaccaaaggaactagttaatctgagctccagccaggtgagcaggctgtgcccaccttcccttcctgaaggaggatcaaggaagggttttctggttctctccctcagctatgctgggcctgctcacaggacccagggtaaaggagggaggagagcacccagccgctccctgctcctcaccaggtgtgaatgtggagaaaaccagggcgtgccgtgagccttccagacctgctttgagtcagactcctgctaggaaaatccttaggttgatgtttaacctaaagatcactaggcctctattctaccacacactgggctctctttttcctctccctctccctccctttctctctgcctctgtctccttccctcccttcttcctggccctaactgctgctttcaacagtgtcagacaaaccctacccacactcttgccataactgaaattttacctcttcaatgaagactgctaattttctcactgaccactacatagcatgaacccccccaccccaggctaaattatatgttacataacccaggccagattaaataattgatgaggaaaagtgattgaggggctgatggttgtagaattactggccccgggagaactcaaagtgcacagttggaaaatgccaccattcagtaccctgtagatgcctggctggtctctcctctccaggggtgtgcaaagtcttgagttaaccattctgtggttgtagaattgtctgctgttctcatcagcatctcccgttttgatgaactagaaagccagaaaaagtaatggtgcggcctgcacactttgtcgggaccacagagtggagttattctgagagccttagtacattgcagacagtggaccatttcggtcctgtcttcccttagttgccagagctgtggagatgaggactcccagtgagcttcccattacagtcctacagaaactcagaaaaccctgacttaggctggtgacatcccccttcctcaagggttaaatgtggatgaacatatacccctctccacacgcgtgaatgccatgggggtgtaacctctgctggcctgctctggggaaggcagagaaaggccacagcagcatccagtcctggaaatagcctgtctctggactccctctagcccctgtcagggaagagaagccagggagcccctctgtcacgttttccttctttccctcacattcgcaggactgaaaattagaagcacttttctcctacacacaaaattcctccctcacacatgttttccccctcctgctttgaaatggcaattgctgccagaatagctttggggagaagaacacagtctctgctgtgcaaagctttatggaaaatgtagccagccagcgggaccaaaggaatgtggtcacccttggggaatgaactggaccaagaggaccctaaggtgctcacggggatcctgcccatgtctgatttcttaatctgggtgtgggttacacatataatgtttgctttacagaacctgagtgggctggacacttaggatttgtggccatttctgtctgtttttaataaaaagagtaaaaattgtagctggtttctacattctggctgttgtaaaataccaagaaggcgggtacagaaggcccgtgactgcacctactccctctccaacctcttcttatactctgggcctttgcagttgggtctttcaggttctccaagaatcagtgatctcaccagaaaccagaactacaaaaggccaagccgctcagctagacatgtgaccccaggccccgaggacagtaatatttcaaacttgaaaaggaaataaatctttagtaattataaagacagcaataataattttattatcattgtcctctgtcattttctatgaagatctctcccttttctccatttttgttttattcaaatacatgaacgtttagtttctaggatttttttcttcctagattttaagattagtagaaagaagaaagaatagggcacctcagatcccagtgccctttgccatttatccttcacactatggtcctcagttcctgttactatttaggtagagggagtgcatatctacgaataatttttaatgcaggtagggctgacaagatggctcagtcaataagagtttggattcatttgagcctcagaacccatataaaatacagcttagcaattgtggtgtgtgtttgtaaccagcactgaggaagcagagacttccccagcctctggccaccttagcctgcttggtaagttccaggtcagtgggaaaccctgtctcactaaaatagtgggtagtgcctgaggttgtacacaaatacacaccaaagtacatataaataaacacatgcacacacacacacactaaagtacatataaacacgtgcacacatacacacatgcacaaacactaacacacacatgcacacacacacacacacacacacacacacacacacacacacacatgcacatggatactcgcgcacccacacggaaattttctaaggtcagaatactggaaatatcccaccacagtgatttgtggctggggctgatgacattgtcagtttaaccttgatgttctatgtcttgaagctccccttagccatgaaaagctttacagaaacaatatattgtaagaaaggtataagaggaaaagaacttgttgaatctcctccccttttcttttccctcgtggtgtgtgagcgtgaagatagcagataagccactgtggtaaaggtcacttgtgccacaaggcaccctgtgagtagatttcggccattcagacaaggcggagaaagcttcctggaggacacagcattctcagtggcctgggagaagtctgatggcattgcctgcccttcggagagcacccaggtgtgactctctggaccacaggctgcaggccagggagcacttggcacagactaggtttgtaggtgtctcaggacactacagcaggggttttagatttcatccagagcacagcagcagcagccacgtgtttaagaacagatgggagatgggatcagtcttggcttaaggctgaacttagacccagatgacaggtactgggtgagttaaaggctttcggagctggaatagtgacaaagagaataaagcaggaagagatgggctgatacagagcaaagtggggagagcttggtaggacttgcagaagccagaacccggaaacacaaactgagaccccaaatcaccaggtgacatggatggctggagtgtatgggaggctggggtcatggatggcgggagggtatgggaggctggggtcatggatggcgggagggtatgggaggctggggtcatggatggcgggagggtatgggaggctggggtcatggatggcgggagggtatgggaggctggggtcatggatggcgggagggtatgggaggctggggtcatggatggcgggagggtatgggaggctggggtcatggatggcgggagggtatgggaggctggggtcatgggtggcgggagtgatgggaggctggggtcatggatggcgggagtgatgggaggctggggtatggatggcgggagggtatgagaggctggggtcctaggaatccgggaattgtggggtgccagtcacggtgtgagttggtccacaggtggctgatgtttgggatcagaacaggactttactaagcaatctagaaaaaagttggtggcacagccttggaggattcgtgtttaagggggggtgatgtgttagccactttatagacgtaaacatccaaggtgggtgacatttcaaagaatgcattttgacacaggcatgtgggccttatgaccccactgcatgccctttgggtctgaataacagattctattatccgctttgttctacattaaggttttacataaccaagtggtggtgaggaataaggcctgatctgggagtttaagaaagctaggaactggacatgtgaccctggcataagggggataagaggtcatgcctgacctttgggaacactttagggagactattgagtgggaccctaaactacaaggcgctactgcaagtgtggaatgtaaaaatgtcgcaagtgtgtgacgccatggatgcagtgagcaggtgtctcagagttcctattgttgtgaagagacaccatgactatgccacgtcttataaagaaaatatttaattggggtggctcgctcacagtgtcagaggttcggtccattatcggggagcatggtggcctgcaggcagacatggggctggctgcatcttagcttgcagggaacaggaagacatcttacagtcacatggagggaagcttgaacaagagagacctcaaagcccgcccccacagtgacacacttcctccagcaaggccacacctcctaatagtgccactccctttaggggccattttcttttaaaccaccacagcaggcaagaagaaatagggttacgatattgttggtgggtgtgctgggctgacagggagacaccttagaatcagaagcggcttcttggagcatagtgtctgaagccacagggaagaaagtatctggaagcagttataagaatgggtttgcagctggagggatagctcagctggtaaaggctaggctcacaaccaaaaggatggatctgcttcttcatggtggggtaggtaaaaagaatcaggtaaatctgatggcaggcggtaaactgatgtctaaatgcttctccaaaagcttccagggctttgtcgagaaatgaatcacgctcatcggagtaagtgtattggggagaggccagcagactgcaccggtccccattactaattaaagatgagctctgtatcacttacaggcttagctaaaccacagcaacactgcaatgccacacgacaatcatctttcttttgttatttttcctgattttcacttgtgccctgggctttagcaaaggacaattggggatcctggctctgatctcccatttaatataatctatcataatagatatgcacgtggactgtgctgtctgtggtagtaatcctcatgtatggtgtactcgagccagcgttgggtagttagtgcatattcagtaaatactctcagaatacgatggaatgaatgaaatgttttattatctagacaggcatttctctagatgaggattagctgtgagtcagactcatacagatcatgcttcatggtttgcccaaacagaggcagaattttccattgcaacataaaacggaatacatttttcaccctggcagtgcctacatttctgtgaagccatgctttgtaatgctgaggacaaggcagctgagcccctgtatcttcaaccagggatctttattattttctttatgtattcaaacttcacagaagaatgttggcaattaaaggaaagtcagagagagaccagggctaaaatgctgaacagggagttgtctagagtgccctaagtttaaaaagcaagtcctggttgcttaattgccatagaagtgacacttctggttatgttcatctgaagaagacggacaacacatctcacaaaatggcttggcctgtttcttcacccttgagagcatggccacttgaaagccaaaaaagataggcacccatggtcaaggacaaaatgagatttgaagcaatgtgacaaggccgcgtatctatatcccaccaacttgacccagctgtgattccagaggaagaaaaacatgttttattgccatccccatttcagcgactcactgccctgccccagaaattgatttttgttagctgcccaaactcttttgaaaacttggtttttaaaaaagcaaatttcttggcctctgccccaagattctgacttgggatgtctggggtggagcccgggaatctacatttattagaagaatccagttatttaaacacaaattattcacagccctcctggcacacaatcttaggggccattcaaacccagcattcaaatcctggccttgttgcaaggtaggtgtacaacttcaggaaccttaggacattcatttgaacctaagttttcttatccttcagatggtgtactatgtctgcttctctgaggaataggattaaatggaatcacttacataaaagggtacacagattaaacaatcaattaagtacataatagttaagatacattttctgggatgagtacacaactacagccttctaagcatttctagaaatatcagcgacttcaacataggatttctgcaaattcatcagctcttgttgtccctcacaaagagtgcattgttctttcagcaaaacgcaggaggcctcattgctgtggaaggtttttatgccaggctctggggaatgtttacattttgtgggaatggtgggcccccggaacatgttacctcagactaaaagggccatcccatttctagtatggttgagacacggttgcttttggaaacaggcagacctacctttggaaaatttctatactgcatgtgtgaaaatggagcgcttggcaagctccatagtaggccatgccttgagctgttttggcacagatcaaattgattgctccactcagcctgcttttaggttgttcaagcagatgataactggaccatgttaggccccaactcctgaaattaaactttggaaatgaacgaatgagtgaatgaatgagtgaatttcctctggagcaaagaaaaactcctgtgacatctgtcagtccattctggccctctggtccctgagaaaggtcaatggctttgttgctcagaaaaagaataagcaaggatgcttccaggtgcttcctggaagcagaccccacttcctggatgtggtgacccagttgcctgtgttagaagatcatgtcacagcctctctcccaacctccactgagaacctttcagcagtaaagagactttcacaagttaggtgtgtgctggagctctgggtcatacgatttgggtcacgcacaaagcaaggaatggagcatggtctagaaaccatttgatcagcacacagggagaaactggaacagaatcgtgaaaaagaaattcaaaaacagagaagggagtaaaaatggaaacacataaaatcctgggaactaaacgtctaaaaggttcagcttttacttaagaaagattgtcaaaaatttcccagtcttcaaatttgaaattcttcagatacatcttcaaaactttcagtccccccactcagagaatatggattaaaatctgtttgtttcatgccctgttactatggaaaggaaacaaaacaaaataactagcagccaatcaagaagtcagagaaatgcataagggccgccctgcaaaggcacggcacgcacatgctcaatcacacatggatatgtgcttacccatggatacaaacaacggagaaacctgaaatgaactctgtttgcattgaccctgaacacatgatgcttcacataaaatagagaaaagggggaggccaagccaaggtgggcaagttggatatgatttcgattggagtaggccttgcctgagttgagtatacactggagtagataccagtgaatgggagtagaattcattccatatcaaaggaaaccactccaacaaaagccaatgggaggaaatgagctcctattgtgtatacacatcaagctccttggataggaagttgcctggttcagcaacttctgctgccttccaagctgcccaggaaaggctgggcctgtactcacagttcagacatggtgcccccagcctgcgctaagctgcgaggaaatgggcaacatatttagcaaatccacccacattcctatacttccagaaacgtctttacagactgtatcttgggaacaccaaggacaattactaaggtatttgttttgctgtatttggggctgtatgcatataatggagagcagacacttggcttggacatctttctgtcttcataggtttcatctattgcttagggtccatgagccatttccatgtagctgtcagtcatgcagggctacttccctgcaggggtctgaggtgtctgtggagagtcagaccatcagaggtgaggccctgtgattggctcaaggaggcttcactttcaggtctcttgcatgaacaataatggcatcatcactcctgttacctgccaccatctatagaaacacagttctcatcatgagcatttgattttgtggggtgctgtgtggtgcctggcactcatcctgaaccacagaggcatccgttttcagtcctggaagatagaagagtatagctgaggattttctgttccaatcagcatagtaagtgaattacccaggtctctggagcccccagggtagggcttggattgagaaggacttattatatattttttcttcttcttgttgcttgattgacagtttgagtacagttaagctcggatctgtggggatgctactataactggcgtgcatggtggagtcattttccaatgatgtcatcctctgaaagaggttcctgagagagggaaaatgaaagcagaggagggaggtgaaggattctgagggccttctgtggagaacccgccatcttgcctgctgactctacctccaccccagcttggctgaagcccagtgtcactgcctcagtgcagttccctcccctgtgcccccatgggacagctgtggcctgtagcatctatagacactgtgtgtatgagggaacaattcattcaaagacaatattccttgaatgcaccaagtttctgttgttgattttcagtttgccctggaggttaaaacagacttggtccttattttcctataaaacgccatttgatggctcttggttgacagtcccgaggtgaacgccaacctgagccagatggcgttcagggtactgggccccagagatgcctggacctggcctcaaggtggattgtcaaatcttctagctgtaaacacagaacatggtgatcaacctcaaggacgcagggcaaggttagaggggacagtgctcagagagggtggccatggctttcctaggcttttttctgaggagatttgaacaagcttggaagctgtgctaaggacagcaagcaaagcaaggggaacagggcatctcagtagcacagtccttctaattaacaaatgcctgctaattacttgcttctgggacttatcaagtctcatctataaactaaaattaacgggcaattgagcattaagctgttagctttgctttcttcctgcttgctggcttcctccttgtttcaggggaaaaccatacggattaagagttaaatttgccatcaaatagcataaggtgaggcagagaaacaagactgctttatgcagcgtggacagggctagggagtggccgtttttacctcctggcacacatcttggatctcataactgttcagcaggactgtggataaagaacacagggaaacttgtacctgggttctggcttgttcagcacacactgtcttccatagtagagcaaacattgcaaagcaacctcatccttccttctggccatgttgtggacagaattttactctcccctcaagccagaaatgccggagaaaaaacaacaacaaaaacttctcacatgacatggaataatggtggtttcaaaacccctggtagctgagtctaattgacagggtgaggtcacaggactgcctggaaaattccaacatgatttttgtgtttagtttattcacatagtattggacgtcaaaaaaaaattaaagccaactcataaactatttgcaatgagtttatgttttcttgcattttaaacatcatgacttttgttctgagtgaatgcaagctgtaattttgaaaacaaaaaaattgaaggccataagagagaaataggccagagcctagaaatgcagttggaggaatcaaattcagaaaacctaagagaaacatggcatttggagggagaatatggtcaggatggctgccctaaacatggaagcttgctggaaactctggcacttagactttttcatgtgttcatgaagcttttgtgactttgttctgcaatgcagaccaactgataacgtgccttgttcctggctggctttgtaatctcaattctttgcccctcgtataatggcctgtttgttttgaggctggtgagcactgaccaaagaatcagacatttgtttcactgacttgttttgaagaaatcggttctgggtacttcttcacactacccgtaaaaacaagcttatccgggtgaggtgtgccgtataggcccaggggaggattatatgtgtgccctactatggaaaatgaaagtgaaatatgataaaacttcatttcagtctaatcactgaaaaacccgagtcatacattattcatagagatgtacagttttactagttatcattgcctacagcaatttgagagggcaaggatgtgttatctactaatgacccttaagaagctcttattaatgaagaggtaagagtggtttgtgaggggtattaaggtatttatatataaatgaatggtaatgaagtgccagcaaagtcggtctcataagtagggtaaatattcacatcagaattatgctgagacttaatttattcatcaagcaagccccttataccccaatttcataaatagttccaaactttggcctagcctgggggcattttcaactcaactcaggaactctgataagttattggtggctgtctgcttggaaaatttgtgagatgtccttaggtgtgttcagggggagagaatactgggatcgattagtgatgcctgccatgaccagggaagagagcaccgggtggccttcatttgctatccttggcaaaggctggtccaagccgttctcaggagtctccattacctacaaaatgataataacttctgtgttactgctgacaccatttctgggtgtcttcgagacccaacaaataatgactctttcttcaggagtggcagccattccagtgtcttatttacttctgctgtgaggaaggacatttgagttgattttgttcagctacgtagagaacatttttattttcacaacccttgagtagaaaaattttttataacttttgaatatttttgtttgttttgttttttatttgggagagggctgttactctgaaatgggcccttttgatagtgtgctttgctgtctcgtgttaatttcaagtataattattattttagtttatgaagtaaagtgagagcttgtttccctccatgaaaataaatttgaggattagcccaaatccacaggttgccaccaccttcttccattttgaaactaaatgatacatggcctttaagacaaaaacagagagtggataccctcaaagggtctgccatggcactttgacctttattttcgaaaacatttttaaatttaatactatcgtatcagtcatccaaaagatgggtattattatcccagtatagagaccagaaaagtaagtttttgatagtttgactattcagtgtgaatctgaaaatagaaccaattctgtttagagatttagatttaaatacatgtcatccattccaactattaaacaggactctcaaaatgacattttatgtgttaagtaacgagaactggagaccttaacaaagtgagaccccgccatcaatgttaggatgttagctactgttctctctctctctctctctctctctctctctctctctctctctctctctctctctggttcctattgttctctctcttgtttttttctctctcctttttattaaattctcttgctgaatttttgaccctgtacagagacagctgtactgtgcagaggtgtacttcagggcaggcctcctcaatggccttttccttcctgctgaaggacacagaccttggctttatgagctgctaacagccagtttttagcatagagccaggagattgtcttaatacacttagtgatgttccaaaaatagcacgggggtgggtggatcatcaatctgaatcacttatggggtcacagtgagacccatggggagctggtaatcttagggagaaagtgttgaggagccccgagaattaaactagctgttggaattcttcgtgactgtcacagcccatcttttgggtgcccattgtctgcctgtgtgattgaaggagatatgcacgctaaaagcttccttgttcactgggtaacactgtgtaaacgtcagctgataattatccctggtaaagattatgtaagaagaaaatgttgaaactctgaagagagctccagtatggtccagtgtgtttctctgaaaagacgattcattaaaaatgactgcatagtgtacttgttttggtttttcttaaaacttcttagaggaatgagctcctgggttctggcttcgtgttcacaatgttagaatcctggaggatgtttttcctttaaaaggctgggctactttgcttttgaaaattctggattgtcatttgattcctgccgtgtgtcaagccaggagcggacatgggttagttctgagaggtggggtccttgctcctgtaccctgccttcctgtttactgactgaagttaatgatacagtcaagagcattggtagagctgtggccacactgcaggccacagttaggacaatgggactcctggcattaaaacaacgtaggagaatagatgttttgtttagttcatccattaaacagctttaaaaaaagaaggaaggacggaaggaaggatcgagagagaatggtgaattaaccatatcacttattccacattttaaatcacattttcgtttattagcattatttttgttttaaatccctttatagacagctaatattttagtctataggctagtcaattgaccttcctataaataacattgagtcaaattaaaaattaactttttggaggtgcaaatcttttaccatatgctatatgtctttgccatggcacaaccttgttcttgtctcgtcccgtgggaaataatatctcttgacagcaacgcctggtgtttattactcctcaatttagcatgtagtaatttattttcacacaacttattctttgtagtatttgtagtgatgtttgaggctcttgtccttggctgattccaagtccttaatgccacagattcagtgttcgccccacatgtcagccacccatctctaaatcatgggcgtaggtctccaagggaccatgccacagctcggcatctctgtgtaaatcgtgaaagaccagaggtcgtgtggtagtcattgttctaagaataatacaatcaaaataagactcttcgtggaatccctcttttcttcctgaaatcttatgagatcaaaggggtaacgggcttgcagggcggaacccttcctgaatgtaccatcctgactgccacttacagtgtcttagtggttaattttacattagttatgttttattattagaaacaataataagcagttataatttaacattttatgccaagcctctgaaaagtgttatgcaaattttactattattagaaagctataatttgcaagccattgtcactgtactctatgagtttgttcttttatctgatctcttaaaggttgtccagccccaccccccaccccatcccaagccacttactgtgatttggaattatccaaattatcatcaagttgtttaaatactaagctgtattttacctcatgacttgttcttagataacacataatttctgatacacagtttggacaacagactgatatttaaaatgcctcttgtagtgtttgagcgagcatagctctcaacaatagaactgtatccaggctcagccacgtgttgtctgtatgtctccatcttttttcttttgagaatgttctgaggttctggaaggtacgtccacatttcagaaatgatcagccctcgatcctagtaacatatgacctactattcactttcaaatgaagaaacaacgtgtttgcagtcttaaaggcacaaggggaacttttagaatttttctttactctttatgtttcagtttctcttctgagggtaaaacctttttttctcaagaaaaaaaatatatttaaaatcatatagtaagtatctggatttgccatgctacattgctagaaaaaagatttaataataccgttcttaaaatttcaatatattgagaccatatctgtttttaatatttcttgtcacttaatattcagttggttctaattgcttattttatacattatattgtgattataatctgagcacataaattctaatttttaataatttttctaacttctgattttttttctcaaagtgagatttgaggaacggctatattttttttaaccctttacacctctcagaatgttttacttgcatattagaactgttattagaactgtgacatggttgaatattttgtaatggctattaaatttctcccttgaaacttacacaattttgctattagcatctactgttttgtgttgtaaaagagaaactgtaacctactcggttcatttgtggttagctctggggcagaggccttcaataattttacagatcttccaaggctatcatgattgctgggagagtccaaacccaatggggtggccaagacatgcacacctcttattacgttcattcccagggcttccttgaatcactacctacatttgacttgcccttttatttcattgttttctctccatgaacatctagcagttcttagattgagtccttgtcttcttccttgggctactttactctcttcttttcttcttttttccctctgtagtccatatattcatcatgtttctccatctgatggattctacttgaacattgatgatgcattttgccaaattcagacttgaattctgcactcaaaatgtcagtggcctccccttctaatctggcatcaagggctgtctgccacacttattcagtttcttgctgctttctcaatgcttcttaatttgtttggctttcctaaattcaactttcttcatctttttttgaaagctggaaaatatgcagctacacaacaacttcttaaattttgctttttcaacaagagacctcatgcaagcctcttaatcctcctttgggtttgtggaatgtcttgctccatcctttcaggtcttcctggcatatccagctgtttgttttggttcattcattcatgttgaatgaagagagaccttcccaggcctgaactgcctctgcattattcaagccagagcacaacatcttacagcctatcagtaaaatttccctcttgagtgtcaagtagattcctcgatgtgatttgattgagcttagtgatgcagcagcttcagtttcatattgtcaggagtaacttctcccttcccagctcccctgccccccagagtgccagcatgcagatcagccaggcctccttcctctcaccacctccactttcagggggtaccgcttgggctgccagttcttgatctgccttgctactagacaaagcttagttatttgctgtgagaagcacggagagcgcaagactcatggctggtactgtctccagttccttcctaataaatttaagttgtctttgtactggacactgtgggtcaagttactcagtgctcaagccgacttttgctgtcatcgtaggctttgtgtttggctggctttaatatcgtttttattttcttgcaatagttttgattcgaagagggacatgtgtgcctgtttgcaacaagacagtcctattccctcccccgcccccctttttgggttatatttttgttataatcaggttgtgactctttgttttgtttgtttgtttgtttgtttgtttgtttgtttgagacagggtttctctgtgtagccctgttttttgacacagggtttctctgtgtagctctggctgtcctggaacttgatccatagacagagatcctcctgcctctgcctccccagtgctgggattaaagaagtatttgctcaagtaatttctagttgagggtggagtgagagggcttagtggatagcagggctttcgtagaagccggaggcctgagttcactccctggagcaacagtgaggcagggctgaactccgggaagctgggctctgagtcccacatgcacttggtacaggtgtacacgcactcccatgcacaagcattacaaaaaaattttaaaggaatttctagttgattccactgatttatgtgtcttttccttcagcagcaacaaactgtggctttcattgttttaaatagcatcctctgttgtaagacttatcccatggactgtgatttctttttcggaaacctctgctcagttctctgcttcttctttcagagaaacaccaaaataaatgtttacatgccccccaccccacttacacaaaccttctccaacactaaaaataatctctgagacgttaatgaaagtgagcttactgactctacaatttaggttagtaagaactcaaatttacttttaaactagtttttgtcagtgtagtttatgctatctgtgtttgagtaccagcaaaggtcagaagagggcagtggataccctggatctggagttgtgagctacccaaattagatgctgggaaccaaagtcaggtcctcagcaacagaaacagatacccttaactgctgaggcatttcttctccactttaagtaacggtgatgacgctggagaaggaggtcagtggaaaaaagtctgcctagtatttgtgagcccctggtgcaatccacagaggcggtgttaaaaaggaaacaataacaaaccctttagccttggatttgatccccacagctacagggaaaaatcaaaaaaagaaaaagaaggaagagagaaaaagagagagctaatcaataatacctgtcttgattattaacgattcaagtattactttacatcccaaagtaaactttaatgctgtttatgcctccccagtatatttttcagttagaatcattcctagttgttttgtgtttatgaaactactataagtgaagtatttttattgcatattctagctgattgctggtagaaaactattaatgaaatattttttattatgtgttctacctgattgctggtagaaaaccgttggcgccattgaaatttctttggttatctcattatctgactgagcccactttttctgtgtgaggaggattaaattcaattctcctgggttttctgggtctgtgatcacatcatttgaagataggaacacgtccccactttgtccaataactgcccacgttttcctgcatatcaatatcaatgcacgctcctgtttgtattcaccccctcgatctcgactttcggaaatttgtgagccgcttgtgttttgccatcatttgtggctgaaagtgtccctaggagatttttaatgagttatagcaaccagcagtagatttttttttcttcttgctgactagaatctacttgaacgctgcatatttattagatttttgatgttataaacaaagtttgggtagtttacttaaatttacatataaatcctgctgattttgatacacatttaaaataaagatgaataaccctttcttgctttgattcgtttcttcatatacccatctgtctatctatccatctctcctatatcctacagacccttgttagggatgtgtagttctgtttgcatgattgctgtccccaaacgctcacagttcaacaagtgctaccaagcaaaaacatgcagattcatcaagatcttattatgtaccaattaatcctaagaagttcgaggcacctgtgacagaagaattaaagcaggtttcattcatagatgctgtttatttcttcctggagacccggcttcttgggccccgaagtttctcatttgaagacagtttggcatcatgcagataaatggagagaatttaagcaagtttcaagtgtgataattttcttcctaaaggaaatccttttactttacagaatagtgacacaaatgttctctgtagagatggcattggcgtatgtactaatacacagaagtgatcctaagatattttctgggaacctacatttcataaaatgtgatagatttttcttgggaatcatcagtttttttcttctagacatatccaattttaactgttaaatgctgctaagaatcatttagctatttagataaaacttttataacattgagccacgtgctggttttcaacaaactgacctgtggacttgtctgtgagactttttttttttgattgctgattggcatgggaggggccagtccactgtgggtggtaccatccctaggcaactgggcctgggctaattaagaaagcaagctgtacaaactagaggcaagccagtcagcagcgttccttcactgcttctgtttcagttccagtctccaggatcctgccttgagcacccaccctggttcccctggatgatgtactataacgtgaaagtcaaattaagccccccttcccagatctcttttggtcatggtgttcatcatgtttatggaagcaatagagacacaaactagaataaaccatttccaaattttataataattatgattttgatttttctttgcagaagccacatggaaattttgaagcattgactactttaaattttagaaaaagaatgagggttttcgttgtaaaaaaaaaaagtcagaaaggaaggtgtttaataacattctgaagtcgggcccaaaagattttgcttgtacaagtttcagtgaaacaagatccatgctatttgccatgcctctgaatctgaacatttgacttaaacttcccttttggcatttttcttccctcacgcgccgtcctttatttgtgaggtaagattggaggactctatgatcctcggcagttcccagtctccctttcatttactgcactgcattcagacagattttaagtttgaaagggaagtagatatccgatggatattttggaagcaatcacgcctcttactgagatgcacaattacaaccgaaaggctcggcacgtaactctgcagttgcacacacagctgattcccgtatttttcattaaataaattagtgtgctgggtttcccagcctgggtggtggtgctgacgtcagatttttctcatgcccactgcaggccctcagctccagaagcagctttattacctcctctgagcagggttagagagtcagacagaattattagccataatgagcccaggcttctgcttcagggttaacgaagaaaatccccacaggtctcaggcctttccctggagatccagccctctctctgaggcaagagcatggttgctagcatgtccaaggtagaagaagcctggcatggatagcttgctgatcagtgttgctcaagggtctcttcttgcagcagaggaggcgcagggcaggaagggttaacgagcctttttttttttcttttatttaggaaggcttccaaatctcactttctactccatcaccgtctgtgcttatcgggaagatacatttcaagctactcaccctccaacaacttaccaacaactcgaaatatagccgatctcaggtctttgaaagctgcagtgtttacgtttgactctatctgtttatgtctgcacctgacagccattgctgtgtccagactcgtcacttgtgtggtggtaaactgaggctgagagggcagttgtgacttgccccagatctcccaggcagtatgtgctgtgcagaagttaaatctcagttctttgaactcccaactgtgtccatttccggcagctaagtgagtgttccatggagcacccatcacacacacacacacacacacacacacacacacacacacacacacacacacacaccctgggtgaccaagtgtggaaggagaagcagggaaaactaagccatcagtttatgacagagaacagtgaacacttagagtggaccctctcgaggtcatagatatttattatctgcttggtttaaaaaaaaacaaaaagcaaaaaactggcattggaaccatgatttgcaaaagtttggaatgcttgctagctgagtgtgatgaggcactagttacagcagctggtggagtgatgaaccagtagactcagtatttgcaattgatgagtcattcttactggaaacgtggaaacaggcggagatgtctatccttgccagccgctgcagaattgaacagtgacctacaccaaaatttccatagactcttgcagccttcccaatgtcagtcttccagattctgtcatggccagtgtaatgtctcagcagtgagtagacaccgccagggacctttcaaggtggatgtcttgtctagggttcatggctgtgtctctggactcttagcactgtgagtttaattaagcagtgtctttcctgtcagaggcatcctgttgttaaactgtgagtgagttatttcaatcaccaccgagaagacacatttcggtaagcaaaacaccatttatgctcacatacacggggagttctgttgtaaccataacaatcacttaacatcgaattgttagttaaaatactgtgcaaaattgaactttaaaaaacaaaagattaaggcatggttgccctttcacacatgtgctgatgaccaaaaggagacagaaacaaaacacttttggttttggaatttgccagacatatatccaaagtacttaactaagtaggtatataataatctacataccagaggaaagtggtgttcaaatccttattctccctccatccctccctgccccctctgtgtctctctcctttcctccccttcctctctcccctcttccctccctgtctctctgtttctctctccccctctctccttccttctctctctgtgtctccctttctccctccctctccttccctccctccctcctgccagccctccctctgtcaggtttgattccattctaagccattggttctcttgagaaagaggccagaccagtttgagatgcaagcaggcttagaggagcaattgaagtcggcacacgggaagggggatgataaaatcatctcagaaaataatcaacaagtaacctgagagtttgtcttgagggtagtatcgaaggttatgctgggttgttaattttccagctcagcagttgtctcaaaaaacaaacaaacaaacaaaaaacaaaaaaacaacttaaagagaaatggttacgtttttaaaagaaatgaggaaatgcagtgccattgggagagggaatgctgagactgagcggggtccacaagccggtgagcccgggaaaaccacagtgctcacatctgggtactagttttgcgttgggaaatcaagggcaaagtcacttgagcagagagcactggagtttacgaggttcttggttcacagatgtgacccccgtgcctagacctaggtgttgctatggaaataaatgtgaatagtgggcacagctccagtgttgggtgaactcatccactcatccacttccatcaccgtgggcagggtttaggagacccttggcctattcccttagtttccccttccgtaaagtgggaagaagcctgtttggcaccccagatgtgacgagtgaccaggtccagaacagcctgtagtgtcgtcttctctctctgctgctcggtggcactcctcaaactgttggcccatggttactatggcaacacagcacagggtgacgttgcttgggttgcttggaaataatgacaagtgtaggcagcagggaagcagagacggtggcaactggcctctgaagagtgactgggtctgtggaaagtaacaaaggcagctgtgcccaagtgaagggacagaccagggagcccgcccgcgtaaggagccgctgctagcacccctccatcccacagcggacactgacatcatcttgcagtgcccacatgtgcctgggcgtatagattgcagtttatacataattgcctgggtcattttattcctcatagttcagacttgaaacacagtaactattggttgttggtttcagtatctatctgctcagtttccttaaagatggatggattgtcgtctcaaacccgcttctgtagcccactttattcttgtggctgagtcattccatgtcaatggcaattaaaacacgtatggctggaaactgacttttcacttcctttcttctaaagttgagtgaaatcactgtaaacaagatttatttatttatttattttgagctattgtcaatcagtttcttcctgttgctcctcaactcctgggtctgttcttcactcaaatggtagggcatgggaaagacttgctctcaatatcatcatccatatgtctcaggtctgtccatgcagtgacctacatggttcaaacaagatagtggttctctgtctttctagggtctcagaaacccatggaatgttccttcctcatagctcatgtctggttctgttctaggattgctgtgtcctgaacaagtgtgtggggttggttggatgtggcgagaggccaagagctggaaggctctcaatgtgatatctccacctcagaaagcgcacccggggtcctgccttacaggaggccactctctgaggcctaccccggagacttgttgatccacagggctgtgcagctgctagacaaagccaagccaaagagggggccgtggacttcttcatggcctctcagggtcaacagtcacttccccagacaacccagagcgccagtgtaactgcccttgacattcagaagccctccccccaactgcgccctcaacaaccccttccactgcacaaggaagactgaaatgacctctgtgcagggcctccatatggaaatagcctatgttctgtgttggtgggagagcaaacaaaaggaaggataattcaaccagtgaggagccagtctccggatccatgtccctcccgcagtgcagttgagggacagtctgctcagtcctctctgtccccttccttcctgaccctccttaggtgccaggtgtaagaggaacagcaccagccaccttttatagtgctccctctgtgttctgcaaatgtctcccttcccatggcatacgctcccattagatcccatggctcagagggcctgctaacacatctaggccaaacacagtcgcgctgataagatttttcacaggagtccctaaaaatacatttctccttaaatcatccttgcaagtcaccaaacagccatagaacttgaaggacaggagtggctttaggaactgccaagccccctccctctcaaagcccagaaactggattcctggggagcagaaatcacagcaggagcaagagaggccaaggactatttcaagtcccatcatgaagaaggaacaaagcaagcgccctgtcagagcaggcacagactatgagctctggagtctgtccagccgtgtgtttgcccattcatcttctggctccccattcagtaaggatttgtccagtgtttgctgtgtcccaaagttagaggctttgctagcggtcaggggatacgcacggaccctgtccctttctcaaagccactacactgaagctatgagataactacctgagcagtgaacactgacgagggcttcagagggagatgtagcaagatgagcctgcatgaaccaggggcctgatgcaatattacatcagaaaggcttccctgtagggtgacctccagggtgcggctgtctgggtgagtattcccagcggaaggatccatgaggttaacgcttggaggcaggatgtgtctggttacccgaggacacagataagaccagaatggctggaagggaggcagaggtcattttagacaggtggtcagagaagccgtgaggcctccatgaaggtctttgcgttgcaaaccattgtaaggtcttgactgggatgtctagggctgtgggcagacaggccatgagcttcctttgtgctgatttgtttgcggggctgtggcagagggttgggaaatagtgtgggcagatggcttgagaggtcacagcacaaaaacacacaggaacaaatcgggtggcttgggtgaagatggagaagcccaggagatgatggaaagcagccggaccccaaggagctaggacggcggcacccatgttgtctttgcattgcagggcgtctgggggaggaagaaaaggacaaaggagaaagagaggagcggacgaaataggtgtctgggagacatcattgtctaaagctgtaaagatccaccctgagtttgacactgcaagactggacagagatgtgcgtaagctgaggcctggtgggtattgcaggctgcttgcgttccagccctcccgctggctcccacgcgcctctctcttccaggcagcgcaggccaccaggcatgaactctgtgatagttctcatgcttattaccttccacctgagaaatcttatcgcaaatgatgctgggtaaatgtttgttctaaaagctctgcctggtcttatctcaccattaagtatgctaacctggggtgagagctgttatcctggtaacctgtgagtgggtccacactgcacttcctccagcaccgcctgactctcgccttcctctcggtgacattgtactctgtgcgaagcagttcagtaggtagaagggaggccgctgacacttctgttctgtgaccgtgtgtgtgtgtgtgtgtgtgtctgtgtgtgtgtgtgtgtgtgtnnnnnnnnnnnnnnnnnnnnnnnnnnnnnnnnnnnnnnnnnnnnnnnnnnnnnnnnnnnnnnnnnnnnnnnnnnnnnnnnnnnnnnnnnnnnnnnnnnnntgctcaggagagaatagccttgccttcagctgctgcctccttcccactaatctccctagacctctggacttgctgatattgtacactgtacatatcaaagcccttaacctttgaaatgtgcacctgccttccttgccgttgttccaagccagccagtaatgggtaaaaaaaaaaaaagtcacaagaacagagtcctccatccaggagcaggtcctgcctttgcaaagaagctccattttttaacacaactgatatttctgtcccttctctcctctcatgttacactactgctggaagtccgtgttctcaccttgggcagcatctgaggacccagccccacccctcctgtggggccagtggacagtttacctgactgaaatggcagggctgtgagacagccacctagaattgcttatccagctgtgtgtcttcaagccactgtctttcctcctggctcttcaggccttccttctgtagctcaccaactcccacttccgcccacccaccgtcttcccaagctccttcctttccttttcttccaaggaaagaaaggagcctgggaaggcttgcaggggaggctggccctcctctgtgagctttgctcatccccctgttactgggatcagccctgaggttccaaaaacagctgtccaagggcccagctgacaccagtgcagaaagcatgggacattccctctgttgttctgctgtgtccctatgccaccaagtacaccagcgttgtatttgtgccctgactgctcttgtcctctcgccacctggagaatcagtgaagagctcgctgctgacagctgtgcacacatatgccctgctactgcagcggtggacgccaaggctgtccttcttagcaatccacctccttctcccttcacgttggatggttcggaggagtttcttccattgtttttctttttctgtcattttcctggtgcttcttaacgtctgtcacctctaagaaactcagtgaaccgtgccatatcctgctcaggtagtcctttggtctccaagtctggcttgcccttgctctcactcggtgaatgtgcgtgtctcttagccatcctgtggcctgaggaactcggattccacctcatgttcaagttcatgtccatgacttctgtgccccatttccaaacacctgggcactttcaacactttcacctggggcacagcttcaggtccttctgcccacatagaccacagctgtgaacttctcttagcctcatctccttccttttctcctcgaccccaaaaggttactgtttgttaatgagtttctaacatccgtgatctctatgtggcctttctttgctgcccataactacagtgcagtgttacctggatttttcctttcctcttcacctgttgctctagcctttggccagatccctacctcttgcaaactcttcagaacaaatgtttggagattggcttctctatggagttttccccaggcaaagtcctatcttcctttgcctggtaccatttgaagttctctgtgctcactctgccagtgccagttcatgtacacttgggcatccccaaaccccacaacactgttcttgatgaggaatgccccacccaaggtgcgtcatggaaatttagggcagatatctggaacttagtggacgtgagtagacagattttgatgtcctgtgatggacatgactccatggactttcacgaccactaaatgtcctgccagtcacataatgtagggagtctattcttagtgataggagctgtgatcccaactctgcttcatctgtttacaccaagctttaattctgggctgtcttagagtagttgaattgttatagactacagcaaccagcaactggataaacagaagtgtgtccctaacaacttgggagcttcatttgggctggtgctgtatgtgtgcatgcacacacaaacgcgcaggcacgcctcgcacacacacagacacacacacacagacacacacacacacacacacacacacacacacacacacacacacacacacacacaccatgtttactctgaattcctccttctacttctgtgggcaaccctgaggttccagaagcagaactgcccaaggtccttccagcatcactgctgttttgaaaagccatgccactggtcacgcctgtgacaacctgtgtctgtgtccatcacacttatgctgtgttcatgcagacgtcagcttcctattgtcctctactacgtctgtgccttggtagcttaattgccaacagttatggcaatgcactgattgttttaaacgtatgtccatcaacaacatgaggcaacccttctttctgaggatattaaaaggtgagaggggagccctgaccttcgtaggtgttgtttattcccttttacctcactgtacctatagttcctgacaccaacagcttaagaaggagacaatcattttggctcatggttttagaagcatcaatgcatcttggtgggggatacatggtggggctcagttaagagtgttggtcatgtgtggcagcctgtccgtatcacagcagcctggggagccaatcaaggggtccacagcctctcagaagaacaagatgaggaacaaaacacagagcaggagtgtgtgagggataggatacactcaaactgtaatagtggcagatgaagggaccattatgttggtgtcggggagagagtgtaggtcaaaggtcagctgggaagaagtgttcactaaagactgggccagggaaggaaagggaaattctagcagtgggatttggagctccaccagcaccttgtgtgcatgcagccatgggttgctggccacccaggagacaaataccatgtcccacttgaatgttatctattacagttgctttccttcaatactgaagggaaattcttaactgaattaaatttggagagaaaacacaatggaaaaaaaccacagtttgaaaacaacgatgcgttgaatatattctatctggatgtgggtttaggagtatacttagagtttttctcttttctatttaaagatgggatctctgtctctgtgcattcctggaactggccgtgaaagtagatgggaagtgttcaaatatgaaaatgaaccttggattttatgacgtttttacttatattttaagacacacatggaaagaaaatttagctgagaatctttcctttattgcctttgtgatagataaagctgacctatttgtgcccttgggagtctctgtctcatttcccccagcaatgtatcagaaagtgtgtccaaagggactgagtaacaatggggatgccatccccaggccccactcaggatgagggctgtccaggtgaagatttcgcaaaggtttctggagctcacatagaagggactccatgactcgtatcccccaccatagagagagttcttcagataaatatgcatgcacacatatatactcactgttcttcagatgtgcgagcgagcaaacactcacacatcattggcttccaagcctgttggggatacagggttcttcattgtgtttctgtctgtgcagcgtatatttactaacacaatatgcccagtgctttctggtgacattcctcacaagctgaagaacaaccctgccacagtttacatagctgcctcattcttaaaggcatgactgacactaagacagctcagaaatttaaaacttaatgcaggtatccctgaagactctagatgagtatagaccagctaccataaagagagcccttgtattatactgctaattatgttgtgtgaccatagatatttatggattatgtgttatcagccccttgatcagtaagctcaaagggtttggtctgtcacacagatacctagaggaaaactagaagccaggtgggaaaagctggtttccatcccttaactttcaaagttccattttgtagataattctttaataaatgaaaaaagaaaacaattcaaaggagtttgtgagaacagatccctttgttggtaactgtgatggctgaactgatttctgtgaagagatggtggggttctctacttacttccttggactgtcatctctgtcactgctgtctgtctcttggtccactgagctgtctcgtggaagccttgtttgacatatcttccccaaggcagtgattactagacagtatggtatcacatcccactttcagcccaggtgcttcagccagtggcccctcccgacttctgtggtcactgcctctgcaccggataggcctgggatgtggctaactcagtgatgagtggagggagcttacagtgagctgttctaaacagtcagtttggggaggggatgctcagataacaacctcttcccaggaaggaaagattattttatttcagggtttttaagtcatgtgctgtggcatagcctataattccagtcctagtggactgaggcaggggaattgccagagtttaaggccggtttgggctacatagtgtataccaggctagcccaggctgaagagcctgtctcaaagaccactccaccactcctgtttacccctccaccaccccccataaaaatcccgctgtgatattgcatgcccgtaactcccagccatctggaggaagctgaggcaggaaggtaggtcagtttgagctctaggctctccaatactacccagtgagtagagagacccagcctcaaaccaagaaacaaaactgcatcctttaagcatttaaatgttgagaatgagaaacccagagattgtaaaaaatgagaaatagggagtcgcagagccaagagctcttcactgtaattagatgtatgtgaaataaaattaaaggcatcctgtcctatgagttactcgttggctaatgagtccttgactgtcttgactcaggaaccggtttgttttgcaggatcctttaatcagtgccgcaggaggccttgtctggcagacagctaacagcagccaggtgaccaggagtgaaccaggagggctgtgccttcccttacggcagtcttaaattttgatcaatctcatcctcaagattggacatgattgatgtttttttcccttcagaaatgtgcaaattatccacaaagtgatggctctgcggggacacctggggggtcttcagcctgggcttgtctgagggtgtggaaccaggggaagccacctcctcctctcccacagtgcagggccaggcattccaaacttcccagctgcataatttagcaattgccaaagaacatcagccgcagattctttcatgtagtccagagccacagctctctgaaaagctaacgcctagaatagtttcaaataaaattctgaaaaaaatggaagtgccgtgtgaggaaaggaccctaaaaatagctgacattggtgtgtagagttgaatggatataccttccgagtttcagtaaataatagagaaagccatttatctttgaactttgagctagtctctcctttaaagacagcgagcctgggtatgaggcttaggaaggatgtgtgcctgtgattcacaaaacagccctttctttctgacatctgtcaccaagggtcaccagaggaaggtccttttgcagagcaagaccacccttcctcaaagacctgaattttgaaagcccctgagtggagcatgttggtctgaaccctcattctcccagagcactcacctggaactggtctcctggttgtcttctgcttggtctagttttggctttgttttgattggtcaggcatgtagccaccagcctcctgccctcctacagctactgctgtagcaatttgtgaacacacagacatcctgctggtgacctgaagcagccatctttgtttctttaccaccctgatgcctaacagagaataaggcagcaagggacactgctaaaggtggttgtccagcttgcacactggtcactccagcaggctgattaaatacagactgtggcatgacctggtcttccaaggttgggtctctgggaggaaccaggaatctgcataagtttcaaggggctacagtgctgctggctcaggtccttcctgtactttggaaatcatgaggctgagtaagaaggtgttgaggctgagttactcatcactggggcagcttcccacaccagtctgctggacaacagcagaatgaatcagggcacctgctgggatgtctctctaggtcatagccaatgaccccgtccaaaccttattcctgtacccttgagcttggtctgtgttaaaatgcaaatgttcattggaggaggatcaggagttcattcagcaaacatgtaagagtgttttctacagacccggtaggtgttgagctgaattcaaaggattccaaaataacagccagactgaattataggcagaaagcaaattccttaagagttttcactgtggtgggcaacagttgggtaagtcggtatttacagtatcgtcagtatttacagttgttgtaagttaggaagtaaggacatgtgtttataaagaaacaatgaggcttgagggcagttataggtaaggggatcagtgatctgtgcagtcacgtatcatctacaagatagtgtctttctcccaaaatcactgctcggggaagatgtcccacccagatgcaatcatagcttcctggtatcgctcttctgtggaggggaagaggctgaaagcggatttcatcaatgaatatctatggaaggactcatttctgtcaccttgcgttgtgattccttactgtttacaatgcttttgtatttcccctataacaagtcctgtgatagccaccatgacatgtaggagaaacccaagaaagttgctctcagagaagttgacttacccggaatagaagagcaggaaccctggtgacacatggagtgaaatatcaggctgccgtgtgaggaattccaagcagtgctaatgaggcgtcacatcttccttttcaaacactgaatcttcgaactcattgtttagcacaccaaagcgcatctccgtttgcatgctaagcttccattggacatgtgcataaagtttacagattgagaaggggaccaatgcactcaactggaactccaatcacactggaacattttccaatagctgaaccgggggtggggagggcaatttgaatttgaaggataaagatttaaaatgcagccacttagtcacactagtcatggtggtggccacagggaggaggttggacagcacggcccagtgcgtatccattcttccagtcacatgaagcctagcagatccagtattgaattaggtctgcgtgagggcttatgccacccgggcccaccggtaacaagttaaaacttggtcttctccatcctctcgtgtcatcatagctcatgatggactgtcccaaacctaattcagtctgttttgtctctcagggccctacagcaacctgcttgtatctacttgtgacaatgaagggcggtggtgtggcatctttgatgactggctacacaatctgtagaataggaacagagagcatgctgggtagatggatgcatgccaaagacctattaatagacttacaacagcagtgtgttcttgttagtgcacacccctttcattaatataaagtatctgtcattgaaagcttgccagtcctcttcttaaaagcaagtttatattaattatgtatatacagaatcttaaaaaaatgatatgtagagtcttaacccctcccctgcaaaaaagaacctctagaagccaaaagtagagttgcattaatcagggactatagaatggatcattgggaaaagttggtcagaagatttaaaaatgcaatttgacagggtggttaagttcaataacacaatagtcacagttgaaaacaaggcaccgagttcttgaaaacagctgacagtagatgttaaagtattcttgccagaaaaacaacaggaaagtatttgaagtcgtacatatgctagagtatcttgcttaataatatgtacatgtttcaaaacattggttatactccataaatatgttctgtttcattggccaatgaaaataagtatttttagaggccagtttgccatgacagtttgtaaacccaaattctggttgctttatcataactcttaagtgggactcctttctgtggactgaaggagccactgtgtgtggcttttgtgaataaagaccactgaatctttattcttgccatctatgcggaaatatctaggttcgcctatttccgtcccacctgtgaagcctgtgggggaactctactgcctttgaggacagcatgtatctcctctttgttgtcttgcaaactgcctaggacttgaggactttacataatgttttctgggtatgaagtaaatgtgtctagaataccatctgaggtccctttatcaccgagacctgtgccgatggccagacaccttttctcagctattgcttaccccacccttggttcttcaccagctttggaggtggagtcgaagcagtgaagctgcaggttccgtcccgtctgtgaaacctgatgcagagtaaatttggtcattaaactcgtcttcttaagctccccagcctaagctacttgatgttgctgttggagcacacactgccaaacagacaagtgggagcctgcttggctccctccaatattttacaattgaagttagctgtgtgtcacagctttcgtcgttgcccatttccttaaacgtgcattcgtatataactcaggcaagtacttccacgacaaataagagagtggtggggttgacaaagcagttcccaccatccacagagaggtcttgctaatcaaggttaaatgaccagacataaaagtacgggatattatcgtggtctctccagtaagagacatagcagctctctccaggatggaacccccaacagcaagatagtttgtctggctttgttttcccagagttaactaattaacatcaattaggagactcactttttctgggaacatttgggaaacacttaattgctgccccctgaatttctttagtacatgctattttgaaatgccatcagtatgactaagtgatggtggtgcactctgatacatgcatgggtggtggcctcgtggcataagtctcatcaacagtactcttgcaggcccggatagtgtaggacaatcacttgatgtgaccttttgatgccttcaagagttgtttgaggctgccagttttgaaacatggcgtactgtgtacagtaaatactttttgttagtaaaaaggctgtattccaaagtgacatgaggtatggtaatacaaatgattgacagacccgctccccaccatccagtgttcatgacacatgacaaacagtgaactgggccagttcacaccagcatcatgcaaaacacgtgagaaatgcactgtgacgttgttataaaactgaccaagacctcatttgtccgtgggaactttaaaccccattctaactttatgacagtctcttacgccctccctaagggtttagcttgactaatctatttctaatcttcatgacatgcccttagctatagctttttagaagggtatcaagaccgagctgatgtatacagtggcttatgttacataccatctctgcaagtggtaatttacagactatagttttgttttttttttaaattcatgtttatcttgttaacattcaagtttaatgttattgatttcataatccttaaaaaattagagcaaatgaactctgctgacctgggtcctctgaactttacagtattgtggtaggcatggtttttaatcttcacagtctcaatacaagagaatttttttttcaatttacagaatttttagactttgtgtgtgaagttatgtgggggttgaacatcccatagaagttagctctctccatgctccggtttcgaggcttagcaggaaatgcctttaccggctgagccagggctccacattggagaggatacgataaggttgtgtctcgattaaaaagtaagcagaaattgattcaagttaacttgcattcatcttgttctgagttcaattgatcaacaagcactccctgagatcctaatagataccatgaaccaagccacctgggaaacagataactgtagaccaccatccttgcctagcaacaagttgcagggaagacaggcgccaagcaagtagccgaaatatccggaaagcaaatatccgggcgtgccctttacctaccccagcatcaaatctctgtaaactcaaaagaattcatggaatagggaacccatgctttatccaaaataatattatctccactttgtaggagagacatatccctacagttgtttatagcacttccaacaataaaatcaatgacctaaatgtgaaattaattgggagccacaattctaatacactgtttggtgattaagcacattagatggaattgtttcaaagggcctaattattgtgtctgccacactcatctgtttgagtctctcctaactcttggactgctgcctggatcattccgatgtacacttgtgttgtttcagttgcgccttcctctctccactttcttcgtggttctcacaaaagctgggatgtctaacctatactttcacacattctagatctgagcttagtagatagtagatctgagtttggatgcaagttgatgtcttatattttgcaggttcacaactgaaaggaatcttgtgacatcatttttgctggcagcagcccttagggagctctttttgtatttacctcttgtgggtttttttgtttgattgcttgtttatttgtttttttgtcaaacacactctaccctgaccctatgactagatgcagtgatctgactttgctaatcctttaatttcagaatttaaaaaggacgaagggaaggaaaacgccatcctgctcagatacaaagatcggagaggcaatcgtgtttcccagcatcctccagagctgtgagcatcagaaccaatattttcccaaagagtgccatcctattgaagtcactttattaaggagaggtgtgtctgcaaaacagtccagagactagaaccctgggagccagagatgacagtgagcacactttgcttgaggcttgatgtcgtccagtggtgcctactgatctgtgaatgaccacctactaatacgtcctctcatccctctttcctggattagacttctgtaaggaattcattgccttcagacttacatgcaggagtttttacaggagtagttttgggatcattgagccttgggttgattccatcacttaacagaaagggacagaacccagagtagctctcatcatggccttgaacgttgccccagtgagagacacaaagtggctgacactggaagtctgcaggcagtaccagagaggaacgtgctctcgctctgatgaagaatgcaaattcgctcacccccccaaaagttgccaggttgaaaatggaagagtaattgcctgctttgactccctcaaggtaagacaatctttttacttgccaccaccaggcctgagttgggcttgcaatggggtgggtggggtggtggtgggggacacttcgcgctgagccctgcagaattggttctgtcttctttgttttgtttctttgttttcactcaaacttattcataccaggcatgcatgaatttttttttacatacctgcctttacattaaaaatacatggaagccgggtgttggtggtgcacgcctttaatcccagcactcgggaggcagaggcagatggatctctgagtttgagaccaacctggtctacaagagctagttccaggacagcctcacagagaaaccctgtctcaaaaaaccaaaaaaaaaaaaaaaaaaaaaaaaaaaaaaaaaaaaaaaaaaaaaaaaaaaaaaaaaaaaaaaaaagattgtatatttctggtctggcacgacatacaggtagccaagggtttcaaataaaagtcgggctattgacatgtgaagtgttttattaacgtttgatcctctctgggttacgcagaggtgaagaagccgcacctgccactttcatgtgccagtcactgtgactcacatctcaatttctcttcttgtgtcgttccttcccaaccagagccctcctaaaatgtttcttgagagggttttcattctctcttaaaatggtttatggccagcagaaattactgagtgcatgctccacaccgggttcttggaggacctactgtctatgaggaatatcatcaaagaactcagtgtgactcagatgtcctcttgatgagctcatgtctggtgggaaaatagggcacagcagcaaataaccgtggtgcaggaagaaagatgtgtgccatacaggaagcaggcaggaggccttagatgagagccagctctcgactgacagggaatgtttgaggaggccgctctaccccagttgtgtattgggtttggtagagtttgggtttgaagaaatggaaaaattcaatggctctacttggaagaagtgtgatgatttagcttagacatctctgaggtttactgtgaccctaaaattatgttgttctgaatccagataggctaaggtagtcttaagggcacagtgacattgtgatatggagatggttaagacatacagcttaatgtttgtgcctatgaaaaactccagtgtgcttacgaatcttaaaaatatttttcatgctcttggcagcctacccgagaaaccatggtgctatgagtttacagaagtggccctaccccattctcaggtgtttgaggtggttaaaccatatgtcaaaaaaatgtctcaaagcagggctatagctcagtttgcgaagacctgactttgtacctagaattcatgtgaaaaaataaaataaaatactaaaaagccagctacggtggaggcacttgcaatcccagtcagtgcttgggaaatggagacaggagaatgtctgtggctagcactgcctagtcagcaggttccagtgagagctgctgcttcagccaaaggtagatttcatctgagcaacaacaccacaggctaccctctgggctgcatgtgtgtgtgcgcatgagcatacacacacgcacatacacacacacacacacacacacacatacactcatacaacacacacactcacacatgcatacacacacacaacacacacactcacacatacacacacacacacaaatacacaacacacacatacaacacacacatacacacacatacacacatacatatacacatacacacacactcacacaacacacacacacacacacacaaatacacacatacatacacacaaacatacatgctctctcacacacacacactcacacacacgtgtataggaatacacacataaaaaatacgccttaagagacataattcaaacttatcactcttgtaaatatgtcttcaaaccaatgttaatatttatgtatctttaaaaagaaaaccctgtctctacactaaaagcagaagaatctattttaaagcccaacagaagtaaaatttgagaaatcagatgtgtactctacataacaagctaccaccatgttagtcctttgtcagaaaggtttattagaccagactaaaatgaaagctggacagatcaatcaaaactgatttgaactctaataatctaagtccatttgtgtattagtattttttttcttttcattgaaaaaggaagggcattctgagttggccttttccgtcttcaccaacagaagcattccctctaaaaagcagagatctatggctggctcctcaaacctccagccagatacaagacagcatccctcagttgtccaagggaggtgacactatccagacacatctcactgacatgacatcaggacaccagtctgtcatgtcatgtgagtactcaggaaagatcctattggctgcgtaggaaacctgtccctctagaagtgtcaccaggaacctgtggccagtgactcactcaagtcacccaccctgccaccactgtggagaggctttgtcatttagaaaagcatactgatgtttctgacttagatagcttaatatttttgccctcctgacatctttttttgggggggggtagtttttgttaattttcatttctttgttgccaaagtatgtgtttgttttaacgttatgacaaaaaaaaaaaaatacccagtgaaagaggaaaaaagacataggaacatgtcaaagataaggctctaacttcttcggtcatctgcaattccttctctagttgaacaggtaataataaatatcattatttttgtaagtttcttaaagttgaaggagtaaaggggaaatattcacaacctaccagggctcagtgacctttgaattcctctggctaactcagagccagaggccctgtccttaccattcagtcatcatcatggcttcaccagggccaccagcagttccaggacatgactgacaccatgttagcaccaaactcaagccatgaggctgtcgagcatcatccaaatgaaaagaggctttcagattcattttcagaagtgtccaatgcaccctctttggaatgtgggaccatccccgtgtaccgcctcatgccgtcaatcccctttggtagctgtggactttggggggctgaatttgtgtgtgctcctgtgaaagttgcctacaggcacaggggtaagttgggcctcagtctgaacccctgttcacccccacccgtccctccctgggttatttacgatttactaacttcaggccccagcacctgtgagaatgaatacatactggagaaaacggctgaggtgtacaccactgcaggcacgccagcacgttcattttgcagcctcgttgttgttgggtttttttgttttgttttgttttgtttttttaaaattagaagtctccataacagggcacacagcttacaggtgcagaaaagagtaattcaaaaaaaaaaaaaatgacaaggccaatccccctgaaacttcatatattttcattaacatgggttgatcatcccttattcagatctccaaagtatgaaacttttgagtcactgacataattctatcaggagaagattttacatccaacttcatgggatgagttactgtcaaaattagaaggaaaaaaaaatctggggaggaaaaagactgaaatacttccagcctgaagcatttgggctgaagaatatccgagctgtgtattcaacaggaaggcaactgataaaacagagactatgaacaaaagctgtcaatgaccgtccctggactccggagaaaagacattttatccccttgacttccacatcctcttgtttagaggaagtatcaatactgttacctcaccctttcccaagtgtccccagtactgccactgattttgataaccggcttaaagggaggctgtagctcctcagtcccacaaattagtcacaacattaaaaaataacactaataagatttgagattttgatgccatttgctaaaagatattgtatgaacatcatggggtattttgtaactgtgagaagaatctttgctggcattgtcaataaagggaccacacactttttttcttgttatgtttatacatattattaaacttcctgtaagtacatgctaaaacaaacttgtaggtgttgaaaaacagtttgctgaggtgtttggaaggagagcagcatgtataaaaatgctttactaagagtgttttggaaaaacacatcatggctctggcagtgcattggtttgtgcattgtgcattgtacctctgatgcctggctgcagctgtcatttattctcaaagtcccatcaacagcttccacaaggacagcttacattctggagccctgttccacaagttagggtgactccacagaagccaagctggacaaaactgttttacaggctgagaattcatctgctgccagggcttggaccttgaccaaattaaccccatgtctgtagtccatgaaatgctttccctcctggttgccatgtttgggaattttctgttcagattccttctcttgtaactctcagaaattaatctgggctgttttgcaaatgggaacatctggaaagaaatacatgaattaactttaatgtttattgagactaagggtttcagttttcttaaacagttgaattcagcttttaaatgggaaaaccaacgtttaaaattgtattgctaatttcggttgaaagtagtctcagagtacttggggaaattgtttagacaaatttcagaaatgtagctattacctttctaaataaaaattagttgatgggctgtggagacggtggtaagttcagatctccagcacccttgtgaaagccaaacccatgcatggccatgtggttttgtaacccgggcattagggagacagaggcagtcagatccccggggctcactcgccaaccagcttagctgaactggcatcacacacacacacacacacacacacacacacacacacaccnnnnnnnnnnnnnnnnnnnnnnnnnnnnnnnnnnnnnnnnnnnnnnnnnnnnnnnnnnnnnnnnnnnnnnnnnnnnnnnnnnnnnnnnnnnnnnnnnnnnaccacacacacacacacacacacacacacacacacacacaccccacatacaaacacatcacagaagtgctagttccagggaagacggtgattcttttggtaccccagatttcacttttccctgttctgggcctttgagtggcttttcacctcacggaagataaccatctgtccagtgagatgtgcctgcatcctatgccagccacctggcttcctctgactgctgtttgctaccgtggccacctaggttttcgctctcctctcagtatacccagcaggcttcacttctgggctgtttgttttgccctttgctctgcttacagcactcttgcctcaggactgtgagcagtttgtcctgctctgtccttcaccagcttctccaaagcatattagtttattcgtgaagttctcgaccaattccacccggcctgggattctactacccctccctaggcctccatgctccctgatgccagcagcagagcggctagacaccttcttgtttgtcggtgtgtcatccatccactccctctgttctgtgagaaccaaggctgcgttagaaggaggatagtgtctgctgagatcgctgtggtgcccagagcctagaaaggtgtcatgtataatagatgaccaataaaaatctgtcaaacgatgcaaacgttggtcacaaaagcatgctggcttctcagacaggttgcagtacaagattgaatggagtgtgctgcgtttgggtgtgtgcagtgtcagttggccctggagagctctgtaacacttagccttgcaccgtgaactgtgacccagatgaaagtaacaaagcagggcttaaaagcagggcactctctgcaggaatttcaagatgagtgtgaccatggaagtacaaggcctcacaggaaaaaagaaaaaaaatggagaaaccatttgccttttcctaccctacaactccttctaagatgaaagaaaaatatcttattatttgatgggctactagcaataagctacctggtggttagacttgaaacttatgggtacaaatttcttaaaaccatatcaaactatgtattgactttgacctgagacactcaagtgcttgaattgttgatggcttgttaaattgaagctagttatttgcaataattacttggatattttgtaaactgtgtggctggttttgacctgaattacaaatacaatctcagacatttttaaattttcaatagtcatcattgtagccagctagagaccagttactttgtaccgtctaatgaccttgctaaacaaatatgttagatcagtgtggtatgtgtggatataggccccccaaacttaaatatttcatttgtgaccaacaaacttctaagtggtagagaaagggcctgatctcaggtcagagtgaccccaaagttgatatagattgacactgtccactctttcaaactctcagctccccttgtggaatacactatcttagcaacatgcatacttagtaaggttagtacattgaagttaaaaaaaaaattaacatgaaatcccccaggaataaacatattactatatactagaaactttaaattttaaatgagaaattataaggaaaaagcaagctagatgcattatttgttttactttgttttgttgttgatttttttaaaaattcaagacaggatctgaccatgtagcactggctggcctagaactctttctgtagactgagctgacctagaactcacagagatctgcctacctctgcctcccacagggtagaattaaagacttgcacggccatgcctggtgtcatggtttttcttcgtgttatgccagtattatattatcactcactagattactgtcacaatgatgattttggcttagggtggcattgtacctgtaacttatgtgattctagaagaaatagctatttgttacaagaggttctttgtcccggcagcctggtcccacagccgcctaaacccctaagaaacgcatagatgctatattagttacaaactgttggccagtggctagctctgtcttaattgttagcccatttctatcagtctatgtattgctacaaggctgtggcataccccttaatacccaggcatgctgttactcctttggcagcatcgccattctggtgggtttactctgcctgcctttcccagaattctccttgtctcgtagacccccctgtcttcctgccggccaatcagtgttttattcatcaaaatacacagaaggacatcccccaccagctattagtgttgacattcaccactctgaggcttagtattatttataattgcatggccaatggctcagactttttactggctagctctacagctacccgtttctaatatcctgtgttttcccaccaggctcgtgccttcttacctcacatcttgcttccctggaggctacatggcatttccctgactctgccttctttctttctctatctctgtttggatttcctgcctagctgtattctgccctgtcataggccaaaatggctttattcatcagccaataaaagcaacgcataattgtcagggtgcagaaggagatcccacatcagctgagcactccttacatcaaaacttcagctctaatttctaccttatctcttaccccgtgattgcttaccccgagtctctacatagatatctgtgtaggtagaggttctttgtcccgcctggttccactccccttgggctccaaataaacacacagatgctatattaattataaagctgttggtcaatggctagggctttttattggctagctctgtcttaattattaacccgtttctatcaatctatgtattgccaggaggcttacctggtaataccctggcatgtgattactacttcggcagcgtggctactctgtgtcaggctccctctgcctacctttcccagaattctccttgtctcctagtccctcctgtctcattggccgaacaatgttttattcattgaccaataagagaaacacatatacagaaggacttcccccatcatatctgagtggggattgaacttagtgcctcacccatgccaggcaaacactccacccgatgtgccgcatcctcagccctgtctcttacttctgttcctggcattctcattctcagtagacggtgcctttcatgcagttgattagttaagacattaagcccagttcattctccatttaccatctttggcggtttgaatacagagtcatcagggagtggcactattaggtgtgtccttcatggaggaagtgtgtcactgggggagggctttgaaggtttcaagggcccaaaccaggcccagtgtctctgccttcctgctgcctgtaggactctcagctccttcaccagcaccgtgtctgcctgtggctcaccatgcttcccgccatgatgataacgaggcccaggcaaatgctgtctcttcactgcaatagaacactgactgagacggaccctgccatctctggtccgtttccagtcctatcctgtcttcttcaagggtgtggtctgactaccatgggaggtcctgcttttgagtcccctgctcatttgatgtagaaagcgtcagtcgaagctcgggcatttccaaggctttcctgtttcactcatgaagtctgaagacctctgagaccctctgtgatctggactctgctgtttatctgaccaggcagactggtcactcttccccaattattctccagtcacaagagcctgtcgctctgcccaagctataaggcagctcttctgcttccctggatggttctccatttcagtctggcattagcttaaatgccacagacctatccacagaaacccctcagaacgtatgcttgagtggtgttttctgtttgcctgtttttctccactgggaggtaaagccttggggcagggatcttactcttctatcctagtacctggcaactattggatgcagaagtacataaagaaatatatcctgaagtcttaaacttttaactgttatgataaaatttgagtcacctttctggctatgtgtttctcaactttccccatagtttatggtaaataccggcaccaatggctctgcttcataggttgacatcccaagatgtttgtgggtcatgttcagcacttatagctttcccaacaggcatgacacatgaagacctgtctcaaatgtcactcatgagtgactaaaatgcatgaattgggcagggtctgtggctcagcggttgagagcttgcatagctctcatgacgccctatgtagtacacacacactagagtggggaacagtgagtggcttttaggacaaccatgggtgtctctgcagttctccaaactctatagaatgaggctggtgtttgacgtttcttcagcagtcagtttgcaaaccagaacgttgacctatgtttttcctatgaagttagattcaattcagaagtgatgttttcaaagtctgaggtggtttccccaattaccataattctcttttcttttatagagtcattatctttagatgactttgctttttttctttagtgccctgcctgggcaaaagaaaaagtggacaattctttgtccatgtccagctcttatgaaagagtaccactccttaaattcaaaagccagggtctgctgtttcataccgcctgcactggaatgtccccaccagaagccctctcttttgtgccccacatgctggaagtgttctgatggtgtttgtttgtttgtttgtttgtttgtttttttaaatccctgttaaactccatgtcacttgagaggactttagaagttccttgggcacttttctgttagcaagtgagcacagtgtgagccatcaaacaagcaaacttccattttagaatgggagacgcccctggacccctcctttggaacatggactgtgtgtgtgcctgctgcaacagatccccaagaatcctaggacagttgtcagacaatgccaactccacaccatgccaggggacacaacccccgagctgtggagaccaggctaggtcagcagggcctacaccaacagtgaacctcacctgtttcacgatttccccatgaactgaccctactcatgctaagtagcatattgcttccacttggtttgacccggtttcttccggctcaaggattgcggttcagtgtgcatgactctttctcagggctgtcatggccaagaacagcaccgatactctgagggcaggtcctccctccctttgagcactgacctttagggattaggaagtggggagtgagtaggtgttggcctgtttctttgcagtcacaattagctaagccatcctgcccgatactaggattgtatcgacgtgactgacaagactgtttcttaacttgaggctgtatactcacatcaaagattgagccgtgcagctgctgaactctgggggatgaaggaccaaaaaatacttctaagcgcttaacctagttaaagcagaagagtcaacttttgactttttaaatttttatcgaaattattatcaccttcccagaacctttctttaaaaaacaagaatggtgcatgtaatttttgacctaaagagtgttattggctacttgagatgtatgaagaacccagtgctggggaggtaggtgcccaatgagtaacttgcttcactgtagaagaatgggacccgggtccgtttccccgccccatgtagcatcaggtgtgatggcaaataagtaatcctgacacgggcatggtggagacaggactattttatttgtttgtatgtttatttatttactgattttgagacaggcacttaccagactgacctgctagtcctgtctcgaaatacattaatgaataaggccaaacagtgattgagaagtgacagtgtttgcacacgtatgcatccccactgcacccaaaagatacgtttatcctcatttaaaaatcccttggtgaatacagcatatgtaagttgttattgagtgtccttccaggtcaggctcagatttcatatgagggagtgtctcgagtgctcctggcccttagcaaaatcattaatggcaccagagagagccttaccacaccgctatgtgaaactcggctctgacccagatgcttggaacttaaaattactcatctgcagactgttttggagactgctaactcacagagcccccttccattcccattgtgcacccagctcttcgcagaagctgcgacctctggaaggcactgggtcccagtgttcttcctgaggaattccagtcaagccagctggttctaaaccaaatgtgaggccaagaacaaagaagcttcacttcctggagaacttcagacacctgtattcatttatgtgttctgcaaacagtcatttagcccctactaagtgccaagcactgtattcggttcctgaacaagagctggcgaccttattctcatggagtttgcagttttatggagagacaatgacagcagcaacccaagatcagaatagggtgaaatggacaccaggctctaagagttgctgagcagacatgccagatgagcctcgtgtgaccttgactttgtttgattagcaaacataagtgaaccttagcaccagctcttccttctaagtgcctcatctaaagcaaaagggagcccaagctccaccaatccaattcatgcagcaactgaattgctctttgttcaaataaactctctaagcttttattgtccctcggtttactttttaacaaaggaaaataaccataacttattaaaggcactattcattcatgaaatactgtgtgtccacagtgtgagtgcccttgagccgggcatttggaattagttgctgacctcgtggggctgtcactctatttggggcaatacgcatggaaaatggaacataggtttcctgccttttgaaaatgtatttgcgtttcccacttgcaggggattccaatagaaacagtgttttagggacaactttgtgcagaaaaaagatggcttgggtgatgatgcctccaaggtgttgctttggtagctgagaccctgacagggaatacacagtgaagagggactttccagttacagagaaaaagaagtggccagcatgggatgggacagattctgtgtcgcactgggatttgagtgcagggcgggaggctctgatttgcctggtggaaggccactccccctggggaagttgcagaagccactggggacaaaaagttggttggtgttggaatctttggatcttttaagtagatggcagtgcccctggctgggggcggtggcagatgcaagccagatgcgtgtggacttacactgtgtttagggtgcacacgggagttcattttatgccctctgctgtggctttgcacaattttactttgctccctgtcagtttattgtcggtggtctctaaagaggttgtctccgtgttctctcggaagccgcagagcccctgcagaatggggttttctgtctcgacagacttaagccttttctgcttctcttgcatgtcttccttctttcctttttatcacagactcaatgtaccggtcgtaggggaagtgtctgtggttttcgtttcctccttggtcggatctcaagaccatttggaattatctaaactctttcttgagctcttaaacatttagtttgtttctgtttctctctctctctctctctctgtgtgtgtgtgtgtgtgtgtgtgtgtgtgcgcgcgcgcgcgcgtgcgtgtgtgcctgcttgtttgtgtgtgttcagtgcctacagaggccagaggagagcactggactggagtttcaggtggttatgagctgtctggtgtgaacactggaaactgagcttgggttttctgcaagaacaaagaaaagtcttaggcccaagtccatttctccaactgttcccttagatagtttaaatagaaagttccgcttgatttccctccctccttcctcccttcctcccttcctcccttttttctagacaaagtttctctgtgtagccctgtctgttctagaacttgtgtagaccaggctgtttcaacctcagggattcccctccctctctcctgagtgctgggattaatggtctgcaccaccatgctggcttgtacttcattctttatttctcagggtaaattttaattttcagtcacaaataaaaacttagattatacttactgaatctcaaactcattttttttttttttttgtaattatagccaggatcaaaattcccccctcaggtcacgccatttcttcccagatcttcagaggtctgtccttcctgctcagataacttcttgacaaataattgaatttctttatttctttctagaacttttcattgagttcatcttggtttacagatctcctagaattgttgttttctcgaggtttcaacttttatcactcaaaagaattaattttactcttctaagttctttctgaattcttttggctgtttttgtttttttgccaaagtgatgtttatattaagaatctgtgtttggtcttacttatcaatcctagaaaagagaaattaacttcttatttaagatttttaaagatttaattctatgtttgttgtttactttcctttttttgtccccccccttcattctaagcagacttcgtcaccctgtccaatctttagtctgctctactattttttatttaaaacatgtctactatatagagcagctttgtccacacctcacagggctaggttaagtgacgttctcacatttgcgagaggctcttttcccccgtcagtcttacttatatgcacatttttctaaaatatgcaagccatttgggagtttccctttgaagttgcactattaatttctaacatttttagcattaatataagaagcttgcatctttcccttgagaaatgcactcaagtgtttttggtgcagattaaaattgatgtttgtacctgacacatgacacctgagaagacgagtttcctgttcggaaggtggaaggttatgtataccaatgtgtcagtcattcactcaagcttaagtgattcaagttctctgtgttcggaacaatttatcctggtgccctagaccagctggagagctacagtattaaaacacatttcgatacgactgtctctttccctacagtattaaaacacacttcgataagactgtctctgtcctcgtatgtgctttcttctacctctaacgttaacttttcatgcatggtgccgtgttatcctgtgtttttcaattctcagggtggctttatggttctaccttacctcagtatgaacgtgacctttggtttagtttattcattgacatgagtagcggcatgacttcaaagggaagaggggatgcttgcccgatgtgtctccttccatttctatgtttgcaactttattatgttggcttttagctcgtgtgagcatcctttctttgaatttgacatttaaaattggaattgatcctgaaatgacacacagtcattaatcatgagcgcacagtaacggtgatactaggctgcatagcaactgaggcaccgctaggtgcttgtttgggctctcacctcaggacctacagggtgagtcgctggccacagtgtgtcaggtgagagattacacccaaatgcatagaggtcattcatctgctggtgttttacatagagtaggaaccatggtaacagttcattgttacataccaggtgcttgggtatacatcgttaacagcgggtcttcaaggaaagagatgatgcattaacagcagcggtcatcagaaggctggcatggaagaaagctttgtggactgggtagattttagctgagacaaaagaaggaccttcatgttgaggagtctgtgtcagtagctccttgccctcccccgccccggtgctgttgttgccattggtcagatccagaaatggactctaggactgtttacatgtggttcccccagtgattgcaacgtatggccagatttagcaagcacatgttctcatcatagactctgaaactgctttcatcacctataaatccattgtgtatattctattggatatttccatttgccttacagggttcaaataaaaacacatagctgtgttaattcaaaaacagcattttccaagtcagagagagacagagaaacacacacacacacatacacacagagagagagagagaaagagagagagagagagagagagagagagagagagagagaaaggtctaagcactgccgacaccccttaacgtcttagtcctgtgtcagtttcaattaccgcctgtagatcactggctgcaaccataaacagcagtacccagtgccagctgtgaacagtttgaaatcacaatggtgtccttcatcgggagtttagggagagcagtccccgagagaaagcatgtgatatgaagggatgtgctgcgtgtgcttagaaagactcagaaaacatgataggcttgctaggaggaagggcaacttggtccctgtgaagagtgggaccatcaatctgcaggaagatatatctttgctcactatgaatgagaaggtggtgtagaagcatgccttaagagttgaaagttctggtctcaggaactgctcaagtagatgcctgggattgatttttggattaagtgtctttttaagttcgttctacaccagggatatactaggagacagtcccatgcagagataattgctaaagcgacagatcccagcttggcagtacatatttcctctggtgtcagtgtcgaaatatttggttgcccagcaaccagtaaatatctgcaccatgcatcagaaaatggttagtttgtgtgagagttgattgtgtggttcctaaaaccacattgtttcactcccgacaaagattctcattagaagttgccatatatcaaatggcatggaggtgtgacccatacagtcccgattttattaaccatcaggcaactgtttgcttacccactatgcacctgtaccagctgagccaccgagaacccattagggatatgttccatccaggcagacagtggtaggaaggccgcaagaggatctccaaagctgttaaagatggttctttctagacaagttttgggttggtggtacaagctgagtgtgaactcttcaactttgaagtcctgtgactatttagcacatgactcatgccaacatttaaggtatagaacagagtttaaatgcataatacacgttagtcataactttcctttcgtggtctcctaggaaacgagcaaaacatctctggatcacttaaaaatttgatctcatttataaacagctgctttatgccgcaagaaccaaagtgccaggatttgccatactccacattaaacatctgccgagacgtcttattaggttttcttcgtaataatgactcacagtgtaagataaaccatggaaccctgcctaaataattgagacactcgtttctgctcgtttgtgtgatctctcaaatccaaattgtagttttagaaagtgatttttttttgagtaatttctttctccctgaaagatttagaactgctctaggtaactttttattagccagttcaagacattggtggaacaatataattaatcacattttttaatgaaaatgatggcacattaattggtaatttggagatgagagttcttcctaattacttattaacctttaaatcagatatacacaagggaaaagaacaagattggtgtctgaatatcaggaacttttttcaaggtgctttttataaaaagaatataatgaatctgtcccacctccacccggaggaacttttttacatttaggagctaagtggcatgatgcttaatctattaactcgctatggaaggttgcatgtatctatttttggcctgttggtgattcatcattaatagaattatggttgaataagacggttgaagtgacgctatccaaagggtttattttaccatttaaaattggaggtagttgcaaagagttccgctaagaggaacaagagctatttttagttgtgttggtctatttgggaaccttaatccacatactagaaaatgaagaaagcgaaatctacagacaggttctagaactttgctctgaaatgacgtatgaagacacagagctgaaaaggttaactagatagcctgtgatgtgaactaagctcactgccatttaaacagtaggcacatctaattggttggacataactgaatgaagagacagataagtggatttcagaggacaagggtccaattccattttctctgatgggaaaaggagccccatcctgggctctctgcttctgtgccgctgttccattgaatacgagttatttgaaggtcaggtttgcttttctatttcttccacagattcattttctgtctgagctttatctcgggccctttgccctgctgactttcggagctcttactgtgtcttcgtgatctagtgggaatttactgagggcctgatgcatgccaagttctgtctatggataacaggtacagtagcaaggatactgtaagctgcagacagtctgacaaggggtcgagatgagtatcaagtgactgtcagatgggatgatgggtaccaggagggtatcagtgagatgcaaagtatgtgctagagaagcccatggttgggggatagagaacagacttgaggataggaaatgtctccctggacttgactggaggagtatggtagagattaattcaagggccacacagaaacttcatgaggtcacttgtcctcagccaccctgttttttgtctcccgtgtctcgctgttccaccatccacataaagagcaatgctggtgcggacccttaggccatgtgcagtggtacagagtgtggtatgtttaatggacgtgctgtggttcatagaggaggcagagcctctacccctgctgtggtttgcctcccatttccaagaaaatgtggctttccctagaagctgcgctactaaaatacgtgcaaagataccaaactggccagggtcacaataaggaaggaaggaaggaaggaaggaaggaaggaaggaaggaaggaaggaaggaaggaaggaaggagtcaaacaaataattgagcatgcaggtaaataaataagatcgttcttgaaaggagaggacaggcaaagaaaggagtgacaattccagctgtcttttacccagtagatattagatgtagtgggcttcttggagctttttggtgtattccatggaattcttcaaacaattctgcaagatgctgaattaaaccaaaccaaaataaaatatagcaacaacaaccaaatctcagctctgtgggtggtcgtcaccaacggggaattgtggtggtctgatgaggaatgcccccatgggttcagatatttaaatgctcggtcttcagagagtgcttctacttgaccgggatcaggaggtgtggtcttggaggaggaggtatgtcatggcgttggctttggggtttcaaattgtcaagccaggcccagtgtctctctctctgtctccctgatgcttgtggatacagacgtcgaactctcagctacggctccagcaccatgtctggatccagcatgccgccatgatgagcttggactaaactctgaactgtaagccagccctagtcaaatgctttcttttatgggagttgctgtggtcatggtgtctcttcacagcaatggaatcctaagtcagggctttggctcagtaactgttgactgagctcattaacgaatctgtatcttctcccccgtcctttacccctcccctaaaacagaagttcctgaggggcagacacctgggttgaagattgccaggagatcataactaacggcaccctaagctcttaccttacctaaaagacaacacaatggaggtttgaccagattcagcgcatgatgcgagtctcatacaaaccagggtgattctgacttgacaagtcaaatcctgctgtcttcccatctgtggaacaccaacttggccatcttctcttcacagggcccctctctaagttcacaggccaataagtgctttcttctctctggaactcaccaacaaggttcccttgataggacagcagtgtgtgctaggaagtttctccatgccgtctttataacagggagggatgagtatgtgtctgtcattcctcctgcttgtgccaaaaggggcggggccaagtgtatgtcccttcctgcagcagcatggagatggtggagtttattctccacagagcaaactcaaactcattggcacagcagagctgagcctcgtgtagctgccatgtcatcctatagtatcgagtgggaacaaaaggcaaataacttgctgtgcctgcgtggttttgggggaaacattgggggggggagggagattacagttctcattctgaaaatggtaaggcagcgctgaaaaatcaggttctctttctagtgattcaagtgatttcagatttcaccaagtgtagccatgggtagcttgggtcccttatagtactacattttagttccttttattaaaaagatactgatttattatctagccgtgtcttttctctgttttcctatggactgaataaaatgtgaagactgttaacactctgtgttaaagggttttttccagtttcatatggaattgtggacttccgccttcatggaagtagagactagtttacactactagaaaaatctgttataccatcaaatgttctttctgtccaattcatccatctcacttctagagagttattccagagaaacacttgtgtatgtgtacagggaagcagcatttgggtattcgtgccatggcactgctaacagcgagaggtggagaggtcagttacaaagctgaccagggcaggaagacacagaggaaatagatgaagcatggttcatcagtactatgacagctcaaatttttctgattttatatgtctatttgcctatcattaaagcaaacgtatacttatgtggccaggacaaaattgccaaaacatattatttagaaagaatgaaaagtttgctgcaatgctttgtgcactattatctgtttttatttaaaaatacaaaaaaaaagtgagtgggtctagctacagagtgacttagaatagctatagctatatacaccactagcagacaactcaacaattacacagcttctcatctcatgacttagataaataagcaagtttttcctctccaatcccagaatgtatgcacaattaaaggccccagctcctcatctgtcatccctctgacattcttgagaccatagggtacactctcttatggctagaggttggaaatccaggctccagtaaaatgaccacttatacaaccacaaccacactgtaaaggagagaaaagagagactgcatttagtaagtcaccagctcttccttctcccatagccacaagcagaaaacagaggggcacatgacattttattctgaggtgataatgaggcgggagtcacaggaggacttgagtttgtccgttctttaaatcccttctgaggttaggggagattgtgactgagccccatgccttcacctgcctctgctcctgtctgactcagagtagggcagctccgagcagcccatctgaccttccaactgactcttgtaacactgcatttcccttccacttgtctccacatttttatctcaggcttccatgttaaccaccatcggaatgctccgaaaccttgctggtcagcattattgtgttataacgggtaatgttggagctgggcaacggtggtgcacacctttaatcccagcactcaggaggcagaggcaggtgcatctctgtgagtttgaggccagagctagtttcaggacagccaagggtacacaaagaaaccctgtctcagttaagaaagaaggcggaggaagaggaggaggaagttgggctgccactaaccttactctcactagcattttccagttcatttcttagctcccacggttatgttggccattcacaacaatgacagatacatcgagaagtaggagtgataagctggaattcccattgacagtagcttccccttcggagacacctacttaatacacgaaacaaggcgtctgtgtcagaatggctgagtaacaatggcagctgacgcattcaactcagtagtcaatctgctaagctgaggggccgcagcagaatggaggtgatgaccaggagcagaaggctccagtggggcgtccttaatgagaagagactgggaccgttcaaccagaaagacagtaatatgtatcaggaatatttaatccagtacatcactagaattggtagcctaattttatagatgaagaaaattaggcattggggctggagagatggttcagcgttaagagacctgacagctcctcctgaggatccaggtttggttcccagcacccatctgtcagcttacaacacctgtcactccagtgccaagtggacctaacgccctcttgtggcctctctgggcactgcatgctcatggggcacagacatcttcgcaggcacaacacccatgtgagtaaaatagcaataggtaagactcgacattttttaatggctggcattaatgattcaggattacataagtaagtaagaagcaggttctgggtctagatgaaaaatacagatagttctagagctgtgtggtttctggttacctcactgtgccctgcagctttgcagacagacggaagaagagaagccatggcgggatgtccctgggggtttttagggtaaggtcaccctggtgtcggaagtgctgtggtaccagaacattgagttaccagcaggaagtgctatgtcaggctccacctggcactgtcttctccctcagcctcagggaacagaaaccctgtctgtaagtcagtccagctccccggcccgatttcacaaatcagttctgatgaagttcttagctggcagaaaggagatcagcccgtgttcatctgaggtaacagatgctgtcagagagtcctggagccgtcctgtcccgtgggcactggtctctccctgttgcttgtggtcagtcactagaaacacaggctggctcttcctgtttccacaactacctggcatccaagcagtaaaccctgtacctcttggatttcttctagttgggctttttctccctttcttctgaggtcactgtttgctcggtggccacagcctttaccttccttgcaatttccccatgggttgctttcacaatgtccttgttcctttctggtccctcagccctcttcttccctgtttcctacctatgaagcccctcccgtggaaagccagaaccaaagtccccctggtgggctggctgctcatttgctttctgatccacgccataagcaaggctcagttttgtaagttttcctcgtctcagtcaaatgaggggagagagttctagaaaaatactcaaaggtttctgtaacgtggatgaactggaggccaaagaagtgtttccctctgacagatttgattgtgcagtgtggttgggtagcaaaactcctcataggcctttgaggagaacagcaggagaagacccgccatgtgtactgtatggcgtcactcatagaccagctccaggtggaaagagtacaccactgtttgtggagtactggcatgtggctacaccatggcaggctcttgaaaagcatcttttatttaatctttaatagtcaacattgtgaggtcctacccactttgtaggcactttattttccctgctacttggtagagcagagtttgaaccgtagaactctgttcccattgtgatggagggaaatgcgtctgttccccacaacaactaggaaaaaaacaaaacaaaacaccagacacacacctgtgacctttgtcctcttccccagcccagactcggttgacatcaggaacagaactgagagagaggatgagggtgctccagggaatggccacaggctgatcttcagaggacagtgagaaacagcagataagacattaagcaagagccaggccagggcccgtcagtggcatgccatcagcacttgcagaaattccatgaaaacattcttacattgtcacttccatacttgagcagacagatccagagactgggaataaccacaactcctgggtggctaaggagggatttgaacctggtcctttagcccaccaaatctggggtccttggtaatctgcttggaatgtggctccaagcttgagtcaagacagggtaattgtactgggtagcgagcctggagtggttaagatagtgaggtgggagggatctattcagaaatttcctaaatatctatggacaagagttggcagattcagacggcagacatcatgagacagataccagctctggataccatacaggaaaatgccaacaagtagagggctccaaaaactgggcaggccaaggttttcccatgaatagcggccagaagacagttgacatgatgggggaaaccaggagagagccaaggtcaaactcagtaaaagcagaggacacacaaacaaacctcggaacccaagcgcatctcagccagccagctgttagctcattccagcctgcttaggatgctgccatgacggtttagactatgtcaaatttattagaaatatattacgttccagtaaatactgggaccatgaaggatgatgaggtatttgctctcccaggcatcactgctgtggctgcagaatgctctgtttgcagtggcttccgcgggttattgttttctaacaaatgtgttactgcacatttgccttacataaacaaatagaaaaataataatagtttatactcccactgaacattataggaaagcacagacttccagttaatgaggtttggagacaacatagcaattctgatatcctgtcaagcttgttaaattgcaattctaccaggattttacatggagacagaattggcacatcccagggtacaaattaggcataactggatatgcatcaactccttcgggtcactaggatatgatttaatgccataattgaataaatggtactgttacgacctgaaaagccctgtctcagaaagtgactggggaagttgaggccgttgtgtgagtgtcataatagtgtctgttcaggctacaagcccacatccaacgctctgtcattccagaactgctgactgctgactgttgcctgagcaggagttttcagttttaaaaaggttctctgactgttttgcctggggagtggtttagagacgaaggatttgtcatatattttatgcctatatgcttagtaatttaattaaataaaatattttcatttagtgtgtgtgtatgtgagtgtgtaagagtgtatatgagagtgagtgtgtgagtgaacgtgagtttgtgaatgtgtatgtgtgtgagtgtgtgtgtgtccaagggtgtgagagtatgtgagcatatgtatgtgtaagtgtgtgtgtgagtttgcgagtgtgtatgtgtgcgagtgagtgtgtgagaacttgtgagtaggtgagtgtgtgtgtatgtgtgtgtgagtgtgtgtgtgtgtgagtgtgcccatgtttatgtgctgtgtaggtcaaacaatgactggagtagtccattggttcctattatttgggtcccaagattgaactcagtttgccacacctcacccagtgccttcaccctcaaagccacctcgcggctgcagctgtaccctccacaatataatctcgtgcttcagccatagagttgttacaccgatgaaaggcctacaaatacaatgtagcaccagacagcattaaaataatatgctctgtggaccgtctctgggaagagaacagtggaaggaaatcagctttgttgcatttggctgccttcttgtgcctcctatctgacttacatgttgataatccacctaaggcttcatgggaaattcaacctcctgtagaccttgggctttctacccacattcttccttcttttaattaccatttcctgtcctgaaagcgaggaaatgttcattatgacctttgcaaaactgtcaaaaagataaccttgtgtttagcttcctgcctcctattatcagcagttctggctacattcttttgttgaagttaatgctaacagttaaggcacatttttgcatgaattactcttattctcaaattctctctctactactcttatgtgtaattaagcaattgctgtaataggagtatttcctccttaagtgagtgcaagccattgctggggagtgagagtgggatctaagctgtacataaatgtaagagaaatcagcaaatatgctggtcccaggagctcagtccacactcgattggtgtaagtgtagactaacagctgaaagcctagctcactgctttaagatccaaagtctctgctactcgtgtgttcttctggtagctttcacatggaaaatccaatgcctttcactcagataagaattatttcccatgggacctgaacaggaagaaaggaggaaatgaaaaaaacagagttagaaaatgaacataacacgtggagggactgctgttttccgtgtgtgtgtgtgtgtgtgtgcgtttgtgcatgtgtatgtatgcgtgtgtgtatgcatgtgtatgtgtgtgtatgtgtgtgtatatgtgtgtatatttgtgtgcatgtgcgtgtgcgtgtgcgtgtgtgtgtgtgtgtttgtgcatgtgtatgtatgcgtgtgtatgcgtgtgtatgtgtgtgtatatgtgtgtgtatatttgtgtgtgtatatttgtgtgtgtgtgtgcgcgcatgtgcgtgtgtgagtgtgcgcgtgtccacccacttgtgcatacagagtaaaagaagctggtcactcgtgactgagctgattctgtgcctaacctgggcctcttcctcttcctcctcacatgcaggaaaggtggggaaatggagatttttttctatggtattaaagtccattttccttcccagcccccagccgccctggtcagaagcatctaatataacaggatatttcagatgaaagcatcttcagccatatttcccactgcttcccaactctccagtcctgcctttgatctgatcaccaacacggatttgattgccacttttgtggtccttttctgaaacccttcgttttccttgagctctctgcagtatttaacggtacaaggactcttctttccttctgccttacagcctgactttggcttctggtggtccaagtttctgaagccttccatatcaccaggaacaaactgagggcagtctctcttgccactgctgtagctggaatggtgtattctgcactctattgcagtggttagtcggttggttccccgctgccagtgtgaatgctgggacctgagtggcagttttactccttggtggtctttactttacttgcaccatttaaggaaggaagaaaggaacaactatttctagagaaattggaaagattccaagcctcggcaaagggaagaaggaaataagagccatgccctaggtaggaaacggcctttggacgttggtctcttggcactcagtagtgcctggtattagttgctgagtaactgtaagttcctgtatagatggggatggattctccacaggattctcgggaactaacgagggtgcaaccttgtctacatttctcagtatgcacgaggtcttcctgtgggccctcttgaccctcagttcttgtcaggatagcatctagaatttctctgtgtcttcctgtgagctccctactcaaatccataacttccttaaaagacagcaagaaatgtaaagattgaatttcttagtaatgaaggaactttgtaactggtgaggttaagatatcctttattagataagtgccagccaaacacaagccagagcgtgtcaggggcagcaaggcagggaggccagagagaaggggctcccatgtgccttgtctgtccctttaaaccctatgagtcatcctgacctcaccttgaccacaccctagtgggcgtggtcaggcacacctgtagccagcctctagcagatgtggcttacactgccccctacatcttagcatccaatgcatgatgtattttccataaaagcatattgattgggggctaagaatatgccttagtcagtaaagtgcttaccacaaaagcacaaggcaggtccctgcgcttagtctccagcacccacataaaagtggccaggcatagtagtgtatacttacatcccagtgcaggccagctgggctagccaaattggcaagttccaggttcagtgtgagaccctgtctcaaaagaacatggtggaaggaaataaggaagacactcactgtcagtctctgccccctccacacacatacccaagaacacactcacacacagaaaacacacatgcacacacccgcagaacatacatacacacacgcactcacccccagcacacatacacagagaatatgtatgcatgcatacatacactcacacacacagagaacacatatatgtgcacatgcaacacacacaggctcaccacatacccacacacccacacacaaaacatacatatacacacactcaacccccatcacacatacacagagaatatgtatgcgtgtgcatgcacacatacactcacacacacggaaaacatatatgtgcacacgcaacacacacaggttcatacactcacagaacacacacacatgtatgtgctcaagcacacagatcacacccccacacactcacagaacacaacacccatccacccacactcaggcacacacctttacacacacagaacacatgcttatacatacacacaaaacacacctgcacatagcacatacacacagagaacacacacacacacacacacacacacacacacacatgttgactgactgactgacgatttgccctgccatccttcctcattgtcacagtccgcccttctttgtgtttctcttggtggacacaagctcaggaacatttgcaaagacgtgcttccctttcaaagtttaacttccattgattttttttttcactctttatgccagagacttaaattgattccagttgtttaaaaggaatgtgtatttttcttctacacattttaaggggaaaatatttaatgtattttccctagactaaaccaaaaccagatactttttccagaagtgtatgaatggacaatgaagttattactttggaagggaaaataccatgatattgtatttcagaaaagttaagtgatcttgtgcttgtgtgactccaggtagaagagaaaatctttagtcagcgattggagaagaaagaataaattcaacggctctcttgtacagactcgtgatagaaaaactgaacaatttcatgtagcagcagagaagcaaattatattagtcagtgcatataaattgcttttttaaaaacaaaagaatattcatgacatttttctgtacaaagataaaatagttccctttatcatggaatcataaaatcttgggtctggaaactttggtaaattagattattttctgtcaagtgccaagccggtgactcctctagggcaaggatcataatgtctccttcctgttcagaatgcccgcagtgctgagccaagagcagtgccagtcccctgagatagcaggcatcgtttcggtgaggacggttgagcgttgtgggggtgggtaaagagaaaaatccttcccctctgcagcagtgcttcactctgataaagcccacttggagccaccgagctgttataataatagggattatgtcctggggatttcccttctcccactcattaaagtgacatgcaaaacactacactggtgcttttgtttggagagtgctggcccactgccataaggcctgcaggcccaaggtcatggagaccctgcacattgaccccccattcagaacctgttgtgggagcctcatcttcctatgaacacagtacagtcgcttacactgggagttcaagatcaatactccacttagacttagttcaggaagtcctaccagctgtcatgtaagggtaattaacacatttctctcaattatgcatgctggtggaggaatttcaaacatttggctggataacaaatccagcccctctgttagagaaaggccatccctctggccatctgggtgtttacttttctttagaatcgagcttcttggaatttgctgctgatgggggaggaaatggtgaggacaaagggaatgttctccaaaacccgacgttgtccacatccaacactgcccaagcctacatgtcaagagtcttagatctttcattaatgcttgccgctttttaattacatta

SEQ ID NO: 19 - DNA, 87474 bp, Cricetulus griseus
  >scaffold_10 dna:scaffold scaffold:CHOK1GS_HDv1:scaffold_10:756101:843574:1
  misc_feature 8433..8532: /note="n is unknown"
  misc_feature 29384..29483: /note="n is unknown"
ttccaggacagcctccaaaacaatacagagaaacttgtctcgaaaaaccaaaaaaaaaaaaaaaaaaaaaaaaaaaaaagagttgctgtaggctgtagtcctggtgtctcttcagagcaatagaaccctaactaacatacacacactcaccactgcacacaaacactttgcacgtcaattcctttttaaagtaaacatgactcagctccccagaaaatgacccaactctaggtcatagtgacccacggaaggcattgctcatagaagtaaaacaggataaaaggtccagaaaaatggaggggaaatgatactgaagcagccctgaccacagagtccagttgaaacccctcaccggctaaaggctgagaattctgacacaactgagaaaattgaccacaaaaattacctaaaggaacaatattccttctcccatatagaaacaattcaaataaagtaaaaaatgaaaatcgaccgtgcttacatgaccttttcatttaaccttagtctttccccagatacaagcctaccatttttttgaggatctcaccaataagactattgacttcatttataatcaaaacacatttcttaactcccttataaatcatgaaccaccctatgatctcatttaccaaaaagaagaggtggggagttcttggctactctttgagccacagaactccagaaaccatgcaaattatataaatggatgttgtcctgagctcaagaacaaatttttctggagcagtccaccccacgtttggataaatagtctcttttcctgagcacctctccctgcccacaatggtcatgatcaaacccatgttaaaatgcttttttttttttttttttttttttttttttgagacagggtttctctgtgtagctttgtagaccaggttggcctcaaactcatagagatctgcctccagagtgctgggatcaaaggcatgcgccaccaccacccagtttaaaaccttttgcttagaaacttgagaagctggagagatggcttagttgttaagagcactggctgatcttccagcggacccaggttcaattcccagcacccacatggtggcctacaaccaccttcaaatattttcaagtcatctgatggcctcttcttgaccaagtaagcaagtggtgcactttacatacatgcagacaaaacactcatatacataaaataaaaaaataaaaaaatttagactggagagacagctcagtggctaagagcacttgctgttcaattataaggaccagagttcatatcccagcaccaacattagttagctcacaaacactgtaactccaacgtcaaggtatctgacaccttcttctggcttctataggtaccagcacacacatctgtgtacatagattcacacacacacacacacacacacacacacacacacacacacataaataaaataaaataaatctttaaaaggaaaagaaactccagctttcaagctggggagaggactcaggaactagagtgtgtactggtcttgcagagacctaagtgttactctcagcatctactttaggtgactcaccaccacctataactccaggtccacaaggatccattgcctctggcctctccgggtacctgcacgcacatgcacccatccacataggtatatccatccacatgcacataattaaaaataaaataaatctttaaaaacatattatatagagaagagccaaatgtggtggctcacacctttaatcccagaactcaggaggctgaggcaggggatctttgtgagtttgtttgagcctggtctacattttttaaaattctatctcctgagcatggcaccacatccttaatctcaacactcaggatgcagaggcaggtagatctctgtgagacagacaccaagctggcctacctgccagatcagccagtcctaaatagtgaatctgtctgtgtctgcatgtctctctgtctctgtctctgtctctgtctctctacatatatatatatatgagaaactccaactttgtttcacattgacccatagtggaattactttccacaatgaggctgagattcctggcttcatctgagtggaactctacaaagaattcctcaggcagagctggagagatggctcagtagttaagagcattgactgctcttccagaggacccaggttcaattcccagcaccctccttcatgacaattcacaactgtcagtatctccaagatctgtcaccctcacacatacatgcaggcgaaaaaaccaatgcaaataaaattaaaataagttttaaaaatttcaaaaagaattcctcaggctgctccagctgcagtgtagatccgggtctctcattcctgctgttgtcgacagaaggactgcaagagcccagaacaaacccagaagcctctacctcatcactcagtccatctcccttacttggaacggtggtcccaccatgctaacctgttcacttctgagagcttccacacacttcctgttacagaagtcccagcaatttatttaaaagatgtatttattatgagtacagtgtctgcctgcatgtatccctgtaggccaaaagaaggcaccaggtctcattacagatggttgtgagtcaccatgtggctgctgggaatagaacttaggacctctggaagagcaggcagtgttcttaactgctgagccatttccagccccacctagcaattctttacccgactgctcacttctgtccctaaggtcactcctttaagactctcaagacccacaaggactcagggctcctaaccctttctccccatcttctgtgtcgcattctctccaaaagcactctccacgtggccaccagagttctccttggaaccaactgttcatttcagtacctccttcaacttcacctgctctgagaaaccaacagctccctcatctgcaagattgagcccatatcaggcaccgtgtaaaaccatcttcaccatgggccatctgtttgcccagtcaacattccagtcatacaactacctagacctctttgaacactccacacacagctgagtctgcaaatatggttttctctgagaagcgttctagaaatcgctgtgtatctctcttcagctctgactcacgcctgaactgagtatgatggctctctgtagagccttcctaagtcctcctctcacaaacactctgccaggatgggaaacacttgtaataaccagcaatcaggagactgaggcaggaggccagcctggactacatagtgaaaccatttccaagccaaaagcaaaactagagttgcttagtggcttctctcacacctgctgccacacttccatgacacggcgcactgtgtgatagcatgtctgtctccctcttgccatacgagttcttgaatggaaagggacggacattagtattctttaacagcacgaaagaaaacatctagcaccctaatgttagtattcaggcatctgtaccagcctgcccttggggttctgacaggatacaccctcagctgcagccactaagaacacctcctatgcatattcactacctttaaaaagggccctgcccacctcccatctatctctctttctctctgtctgtctgttcccccacccctctctctctgtctctctctgtgtgtctctctctgtctctctctctccctccctctctctctttctctctctctctgcctgtctctctgtcacacacacacacacacacacacacacacacacacctcttttctcttctactgctcctgtccccagaggctggtctctccccactcctttccattccctttcccctaataaaaaacccctccacataacacatgagctctgtggcatggtgtctttctctcacgcaccgctttttaaactgcaacacatagtatgactacatcacgcttcctgaagaagagaatgggtgagagctgttaataaagctgttctcctgttacacatgaagatttagcctgggtcctcgattaggctaatcagaatgcccttccaggcctcagcagctgacttgtacggcgagcttacgaaacagtgactgaagaactgaaaccatgaatcatgtcagtaaattcttagcatcttggctgcccttctgaaccatcttgccaatctctctctctctctctctgaacaaagtccagatgtatagtatgtattcccatttgtatctcacacacgtgaccactctcaaactgcgggaagagtaaacgcctacaaatacccaacaagacagtaacttcaatcaaataataatcaataccttacacttgagttccatgcatagttttcaccaaatctttctagcatatgggttctgtttgtttgtttgttttgagacagtatatcactcactatgtacccttggctgatttagaccaggctagccttgaactcacagagttcacttgcctctgtctcttaagtgctggggctgaaagcgtgcaccacttgtttttgtttttataagacagggtcttgctacataggccaggctgtccttgcactcatgatacatacactttcaccttctgaatgctggaattggaaacaagtgtcacacgcccagctgtttttcaccaaatctctgaaatatgcagaactcatgggttcaagtaaccaccctgtgtctgcgtctggagtagttacatcacagcagctagatcccctgactgtcagttcattctctcctcacactggaggtaaggtcattgcccctcacacctagaggcgcacaactgttgagctcagcctcaaacacatgtggagcccacacttcactctcccagggctgtcttaaaagtatgtcctgcacccacatgaaaaccctgtgcctttcactcactggggaagtcctaagattctgtggctactttgcatgtttccttgtgcatgtgtaggtattcgggtgttcaagagttttcgtacatttctattcccaaattagaaacagcaaattggaggggagtgacagatgtaggtgggcattaatgccagaatcaaggaatgataggcagctgtcacaggtggcacaaacagacatcaggaaagagtaaaacccagggaaccaaagtcaagccagcagtcggtagccgcgaaggaaacgactgttcttccttactaaggggcctgaggagacctcacagttacagaaaaaaaatcgagacatgtttaaggccagccttcattatttagcaagaccctgtcttgaaaggaagggagggaagaaaaaaaaaaggagctgtgcaataataaccctgagtcatcaaaagaaatgtcaaattaaaaggcaaggaaatgcaccactggttttaaagagatgtcagcaaaagtggttaaaataatagcggcctggcgctcacagggatgcagttgccttaaaaatatcacttaggagagcaatccttctctacacaagccacgttacttcataccacatcggaggagtccaagactaacagatactagaaggggtttcaccagtgagtgacctaccagatcacacaaaagtgacacaagagaaatcacagatcacatctgagaccgcagggaaaaggcttcggtagtccccaaagagtgccttctggccttcctaaccattgccttgcctgacaaacatcccccacacagagatcagtgtcagccacaaacatgggtaagtaaatcacaagaaacagtcggctgtttccataaccgtaaagcagggggctggacgaagctgagaaaagaaagcaatgaagaaggcagaagagcataggaaataggggagtggagtgagtccagtggaaaacggaactgatgtaaaattcctgcacaccctgctgctgctgctgctgctgctgctgctgctgctgctgctgctgctgctgctgctcctcctcctccccctcctcctcctcctcctcctcctccataaactgaaagaatgtctacacttcatagctgggggatcagataatttccaaggtcctgcgatcatccaggctagaacaggagctggaaagaagggtctaaagcagtgtttctcaacctccttaaggccgaggccctttaaagcagttcctcatgttgtggtgaccccaaccataaagttatttcattgctacttcataacggtaattttgctactgctatgaatcgtaacgtaaatatctgatatgcaggatatctgatatgtgagctgtggttgagatccatggattgagaaccactggactacagagtagccacttccaatgtggctctattcgtacagattttaagagaagaaaaagtcaagatggatcaaaatggaaaggctataactctagcccatggaaatagtcatgcaaactgcctccaagcaacttgcttcaccaataaaactcacacagactaagatgaagaaaggaaacggtgtatcatgaaatgagaaccaaagtagctgtctttttatcaaacagaatacactccagttaaaaaaaactataaagtatatggtcgtagtggtgcagtgttaatcccagcattcaggaggtggaggccagcctaatatacagagagagttccaggctagcctacaaaatagtactgagaccctatctcaaaaaacaaacaaaatcctacaaaaaagatggggcagtgaggtacacttgtattcccagttgaagcaagaggatcacatgaacccaagaattcaagaactatagaataccataataattaaaaaaaaaaaaaaaactctgccggacgttggtggtgcacacctctaatcccagcagaggcaggcggatctctgtgagttcgaggccagcctggtctacagagtgagtgccaggacagcctccaaagccacagtgaaaccctgtctcaaaacaaaaaaacaaaaacaaaaacaaaaaaaactctaaggataaaaaccacacagggtcaaagaaagttaaagtcacaatgataaaagatcaatccaacaagaagaaataatagaggttatagagatgacccagcagataagacactggctgctcttgcagaagacctgggttctgtttccagcagtaacatggtggctcacaactacctggaactctagttcttgggggaatacaacgccctcttgtggcttcctcgggcactgcatgcacatgacagacataggcaaaacactacctggcttttacgatcattccaccccttgttctacaaaagtccctgcgccttaaggaagttgggtctgataagatgtcccatctggcagggctgaaaactcctcagtatcttgctctctgcactttgaccagttgtgggtttctgtgttaactgtcatctcccacaagatccagaagcagcttcttggatgagggttgaaagacttgtctgttgggctgaaggagaatgtcctcacggactcatatgtttgaatgcttggtctccagttggaactgtttaggaaggattaggaggtgtggccttattggaggaaatatgtcactaggggcgggctctggggtttcaaaagactgatgcaatttccaattagcactttctccctcttgctttcagatcaaaatgtgagctctcagcggtcccacacctttgctctgccatcatggactctaaccctctgaaaccgtaagtccaattaaatgtttgcatttatatgttgccttggtcacagtgttttgtcaacacaacagaaaagcagctgatataacttgttgatctatagtaagtcattaggagtcagtttactgctatatttatttagcagaataatatagtagggcctccccagggtcactgacctatctagccacacgtcatggacctgatgataatgccaggaatgggttccatctcatggaataggctttttgagttttgtttgtttgttttttatgtgtatgagtgttttgcctacatgtttgtctgtgtacaatatgcatacctgctgccaatgtaggtcagaagaaggcctcagatcccctggaaatagagttacagactgttgtttgttgagctcccaagtgagttctgggaatcaagcctgagtccactacaaaatcagcacatacactgtattgatgagctatctctcaagtcctgtagatcaggcttaaatcccatcagaaagtagctggttatccctatcacattcatgccactattgtaactgtgggcatatcttgctagacagattattactgtagttctcaaggttcatagttcataccgaccattatttttctcctccagtagcaaacataacacattccagcacagccaggcagtggtggtgcatgtctttaatcccagcactcgggaggcagaggcaggtggatctctgtgagttcgagaccaacctggtctacagagtgagttcaaggataggctccaaagctacacagagaaaccctgtctcaaaaannnnnnnnnnnnnnnnnnnnnnnnnnnnnnnnnnnnnnnnnnnnnnnnnnnnnnnnnnnnnnnnnnnnnnnnnnnnnnnnnnnnnnnnnnnnnnnnnnnntgtttgtggctaggaaagaaaaagtcatccatgatcttacccagctgtgaactgtgtgtgctacaatgcccacctaccaggcaagatgtcccctttggcacaacagaggatgtgactgttatgtggttaaccaaacactttgtgattggatttgaggccagctctacaggagggaatccacgcctggtactgtaaaccttgtctgaagcctatggtacaggaggtcataggccataggggaaaacctattagtgttgtgttgctaaatggacatagtatccaactgccttctaaatctcaatatttataagcacagattagtgttgctctcagccttggtcggagaagctccttttgcagagactcctagctggtcaacgtgttgagaacaagtgagtgctcagccctaaacaggacacctatgtcacctgctccaaggctgaagggacatctcaggaaagagggtgcaaaaaaagaaaaaaaaaatgtaagagagccgggtgttggtggagcatgcccttaatcctgtactcgggaggcagaggcagttggatctctgtgagttcgaggccagcctggtctccagagccagtgccaggataggctccaaagctacacagagaaaccctgtctcgagaaaaaaaaaaaaaaaaaaaaaagtaagagctggaggatgggggaagggctgtgaaactcgaggggctgtgaaactcctctagacgtcacgtgtcactgcactcatgaactcttggagcaaagctgctcaaggtggagccagtcaacactgcatcagggactggggagggctcctgtccccaggggaccctccggtgttaaaggttgctggaggatgaggaattatttcttttcttcaatggtctagcccatgcaccagtaaataactccccacaaatgttcaggcaagcaagccttattaaactcagcaaataaaccaacaaaaaagaaatgggagggggacttgttgagaaaaagacgtgggttcataagaggaggagaggagaggagacaaggggaggggagggggtaacaaggattgaaaatgacccaaatacattgtataaatgtatgaaattattttaaaaaaataacaattttaacgacacattttctcaagcagatgacaagaaccaacacctaatttgtcttctgactccactcacaaactgtggcactgacatacccacatcacatgtgaaggtgtacacacacacacaaagataaataaatgcaaatattccagtgcttgcagcctcggtcacaaagcaaattgaggccaggctcaactacatagtcagacctcatcttaaaaaaaaatgaatgactttgaactgattccaggcatgctccaccatgcctgcttgactcttacagagtacagaatgagaagtgttgccacagaagcagagtgagtgaagaaatgaggaggactgaaacagggcagaggaagtcagactatccctgtctgcacatgacactacgttatacacggaaaaactcaagactccagtccaaaactgttagaaatgacaaattcagtgaggttgcaaaatataaagctagcaattagctcttttctacactaatactgaaacttctggaagacaaatcaagacccattctcacaatagcttccagaaacaaggcccctgaaataaatgtaaacaggaaattgttgatttctacaattaaaatcacaaaataacacttaaagctaaagaggatacacatatacacacatgaaaactaaagagaacacacatagagagaggggagagagagagagagagaaggatctttgatcctagcaaatagatttctgtgagttgaggcagacagggctacatagagggatcttgtcttacaaaacaaaaaaagaagaggaggaggaggaagcaaaggaaggaaggaaggaaggaaacaaagaaagaaagaaagaaagaaaggaaaaatgttcacagattgaagaacagtgctaaaatgtatgtctatattacacaaagcagcttacagtgtcagtgcagaatacacaatgacattcttcacagagaggaaaaaacaatcacaaccgaatagggagatggctccacagctaagcataaggatccgagttcaaatcctcagaacccacacccaagtctagacagggtcacactgtcggtggcagacacaaaggcatcaccaggcttgccggccaccagcttcagtccaggttcagaaagtcaccctgtctcagtgcacctcggtggactgaggtagacagtgggagatcagaactcctgacatcttcctctggtttctgcttgtgcaccagttttgcttttgtttttgtttttgtttttgtttgtttgtttgtttgttttttggttggggtgcttaagagctagagcaatcctgaacatgaatgaaacttgacagacagaaccaggtttgaagcctgcctagtctatgctgcaagttctaggccagagaaggttacacaatgagagcctgtcttaatttttaaaaataataagataataaaaatttaaaaataataaaaaaatttaaaaagtgataatagaacaggtaaggaggagggggaggagaagggctaccagaacctgggaagggaaaaggaagccaaggggtggggataggatgattggcagcacagggtacaactggaaacgacaaataacaactaagattctacagcatggtcagagagtggttgacaacaatgtattgaacgtttcagaatagctgagaggattttgaacattcccaacacaaagaaatgatgacacacctatgaaatgacagcaaagccagccacatggctgatgatccatgctgtgcacatggattaaaagaccacactgtatcccataatacatacagcgacggtgtgtcagtatatatatatagttaaaaaccattcatgaaccaggcacagtggcacacgcctacagtcctagtacttcagaggctgagccatgaagatgccaagttccaggtcagtatgtgctatacagcaaggctctgtctcagaaggaaaaaaaaaaaaaaaaaaaaaaaaaaaaaaaaaaaaaaaaaaaaaaaaaaaaaaaaaaaaagaggaggaggaaaggaaagaagggaaaaaactaaaagtgcataaattaaatggataactaatgcactgtaccattacccataatcacctgcaaatctgagaaactggagctactgttcaaagccatgaacagaaccggcagctagataatctgataaatgctaagaattacaagcaatggttttgtcttacttcattaaagaaaaaaaaaaccaacaacaaaactattcttaaaggagaacaattaggaagaacatgagaatatactaattgctacaagcagccagaattagggaaaggtgaggtggacgggctgctttcttccttttttgtttttttgttttgttttgttttttgagacagaatttctttgtgtagccctgactgacagtcctggaactagctccgcagaccaggttggctcaaattcaaagagatctgcctgcctctgcctcccaaatgctgggattaaaggtatgtgccaccactgcccagctctttctttattttttaacactgtattgaattctttgtttgtttgagactgggtttcactatgtagaccaggctggcctcagaaacctatctaactgccttctggaattaaaggtgtgatcgatccatcacattcaacctatttgtttgctttttgagacagagtttcttgtatgcacggctagcaccaaacgaataaatgaccttgaactcctgacccttaagaggactccacctcccatatggtggggttacaggcagcaccatgcacagtttattcggtgctggggatcacacccacagtctcaagcatgctgagcaaactctctcttaactgggcttaccttgccaacccttaaactaagatgaactgaattttcacacaaaactttttaggggtagtactggtggttaaactcagagcctccacttgagggcttgttaagctcccacagtatacattgatttttataattaaaaaaatgacataggcattcatccccaactcctccttgactggactgacaccccccttctgcccagtcctctacatcaccattcctgccccatctctacttacagatgcaggcagcagccagcaggcggccagcagcatagggggcaccacagctcgggaagagaggctgcaccatgtagttggcaaaggtgatggcaatgacggcctggctcgtgggttcaatgatgagcagagaagtccagaggcggatgaaggcaagaaatcccccgaaggcctccaggatataagcatagctggccccagatttcttaatggtcgtacccagttcggcataacaaagggccccaaagacggagaaaatgcccccaacagcccagatgaccagtgagaggccaaaagaggcactgtacatgagtactcccttgggggagacaaagatgccggagccaatcatgttccctactatgaggcacacgccatttagtagtgagatctccttcttcagttttacctgctcggccaccgggctggccctgtctcccagagcagaggcattttcctcatgctgggcagccacttcatacttggtgctgtcgaccatggtggggagaagaaaggtcttcaccagcttgcttgcattgccctctaaggaagaaggaatgggttggtaaccgcatggcatctctccctccccctccacagggacccagacagtcagcacccacaattcagagaccttttctcacttctgacttcccaaaaacctcctctcctaagccttgtcaaatgactccaacttggcttttccccaagaagaaaagcaaagcaccccagtctttcgtccttcagatgtaacataccttatttacctgccaactaaatcctgacttactgtgacacagggcaggcataaggcagtttagtagctctccatataaccatagtggcttgagccttttttcccctgcctctccaccccctatagcccccaaaaagcctgtcttccctccaatttcagtttcaaatgtcgatatactgagatgtctacatgaggaaccagccctgcaagcaactaatttgctagatcctctttttgctgatatgttgctctctcccctaaggacactgcatgcaagcccgaagcttttaaaatgttcctgctagggacatacagccacctccctgctccggaacatccattaacaaacggtcatctggcatctccgatgctggcaaagcccaggcagccccacccatctcgaataaagagacaggcaattctctttacatcgcttttccttttccagatacctgtcccagcctctatcatcccaggactcctgccaccaaatcactcgcattcacaccagccaaaaagtagggatgatctttcagaagggtggccgaaatacacagcagaacccagaggtgactggaggcagtggtggtggatgcccacccaccacagaactgctggagacataccagaccaaaccaaggaaaggaaagagctaaagccaggcagcagatgcctggaaatacagagctattgacagctgcacgaacgaggaaagcttagtcagacaaatggggaaacattagagcaagaggctcgggagctgaggaagtgactggacatgcagaacagcagagaggggttatcgaggggacagggtggggcacactcactccctggctctggatgtaagtagggttcccacagcaatggccagcagcagtcacagagacaaagacggcaccctgcaagaacagtggtctggcctgctcctccttcctccaacagtcaaagggaagcctagacaaatgcctacccgatttaagacaggtcaagaagggaggaggtggtgagggagctagaaaaggaaggggtgagggaaaggcagaggagtgttaagcaaccatctgggtccaaggttcacgggcctttcacatctgcgaaaggggcagctaggagctcttggctcagcattttcagtgataagaaggagctcactcaggagtctcctttgtcagctctgccccaggacaggaggcccagggggaagggatgggcaactgggtgtgtcctctgcaaccctggagtgtctagcaagttagctaggacagagcggtggcccagacccctgcgccagtgtccttgatgtcccacccaaacctcattcctctctcaccccaaacaagaaaggcaggaaggctatagaatgtgacacattgttcacatgctgagattacaggaagtgtgagagaggttcagacaccctgtgtgggcgccctaagtaagagctctgtacacttccccatgcagagagaagctgacagcctctaaactcaggccatcaccccgaaggctgagcctcaagctatttcaaaagaaatatggtccagaaatgagatcaaacttctgggtacaaacaactccatcccaccagtgtgctctttcatccttaaggaaatatacctctgtagcatccaaaaattcctatgaggggaggtggtggctcatgcctttaatcccagcacgtggaaggcagaggcaggcaaatctctgagttcaagggcatcctggtctacagagtgagtttcagggcagccaaggctacactgagaaaccctgtctcaataatggtaataataagcagtaagttaataaaaagtatatacatatatatggaaggctggagtgtcactcagtggtagagtgctaacctaccctatacacacaaataagtgtggaaataaggtttcattgagctatgctaggcaggcccggaataaacagaaaaggttccatattttggaaatcatagtttattctgtctttatagtctgcttcaaatctggtattccaagtcgtttttggcaacctacctgttctgaaacagaactttctgtcctttcttctatccttcctacccctttctggttattctaaagtaccctggaggttaatctctacagctcaccttcccattctggccccttaaaatttctaactaaatctagatagaatggtgggcttaggccttgcacagaccctgcctgaggatggagagagtagttaagagcactggccgttcttgagaagacgtaggttcaaatcccagcacaccacatgtcggctcacaacttcagttctgaggccttcttctggagtccatgggcactgtacataaatggcacccagacacatgcaggcaaaacacccatacacataaaaataaaataaaaaaaaattgaagctcatgtttctcacaagacagtaccacatacatctgaaagatgctgtccttttctcccagcatcccccaaaaggcttccataaaagcagtgctagtgttgcttgaattcttgtccaggccagacatactgctacgcatttcagtccgttatctctctgaactgtgagccccatgaggcaggtaccatacactctgctgggtgccaacgtagaggggaggcaggcaggcaacaaagatcacagagctatgctatcttctcaacttccggctctccagagcttgctggtcgcttggccttcccttcagacaggaaaccactccaggtggctccctaatgagttacctagaaggagcctgggatttgatatctgattaaaaggaaagcccttgcagtctataggcggcaatgggcgggggcagagggggaggggaaggagggaaggggagacacgggacgggaggggacactgtcactgccttcaggctgctcctcattttgggtgaggattagccgtgacatctagtgtgcccactcctaaagacacagaaacacacatcaggacacctgcccttttaggatcaaaatacaccagcaccaatggagtacaaattcaaacgtgaaacccagaaaagaagaaaggaaaaagggaagtaggggttgtgcacgaggttgaattcatggctggcataaaagtgaaatcctcaaggaactgagtctgatcaacccaggacagaacccacaccccagcaaacagcatgccctagtggcctcaccaggaagtactccaaatggatttatcttcccagccctgccagtcaggcacaggaggctgccattcatggaaatgtccctcttttctcaaccactgtctagcaccaaagccaagaagacgccagcactggcagctcactttcctccctgagatcctggctctcacagtgacgcttgcagggttcaggtggcctggtaaagcagcatccccggagctctcctaaaggaactcagccaaagcaggtttcccagaagcaagccttcacgccccttgtcatttcccctttcctttagtgtgctcatctctgaggacatcatggccattccagaagaacatacactcactctacaacctagagaagttttcaatccagggcttccagggagcagacaacaggacaccaggcatggagtgtctcacagagcagccagccagtgttgagctaccatgctccatgctccaacagcaacactgaaacacccttcctccaggaacctgcacacaattcagagtcttgactccctagccaagctccatgagctactgtgagaacacactgtctccccccacagaccctagggcttactttccgctatccagcaggttcatgtgccccccttaacgagagaaacaaaacagatacgtgctagtgcagatagattcttcatcactccacaatagctgctcagcccctccctctccagctctctattggtttctctttattccactataactaagaccgtccctttaaaaagaaaaagtgaattagaaaaagaaactgtttactgttctgcccaggacttcccattaacccaaagctgaagtctcgggacacaaggctctacctagacagggccaaggctaggggccaagaaataaggttcttccgtctccccttgaccaatctccaggtactccagcctcctgtgctctcccacctcttacctgtctggagacctttgggcaagtgcagggaggagggggctgtgagcccactggggtgaggggtggtagctaagagaaccaggggtgtgacttcagcagctgttgactctgagaagcagaaaaggcagagggtgacgggactgaaatggaaaacaggaaaacacatgtgtgactctggccggccgtggggaggggccagaggcctggctggagctgaggctgcctgcctggtcagaccgagaggacctcagagcctgctggcacccaggcatcttcccctccgctgggctcctcctcctcctcgaatcagcccctggtcctccgagtggcccttgctttctgagcacttgagtgtaccctacaatgtaaagtgccctcctgagcgccctctcttcctcgccttcattctgtttcctaactctcctaccctacaggctgtacttactgctcttcacctcaagctcccactgtccggccagtaaattctgcagtcctatctcaagagttggtgccatgtcagcctctaaaacaaaccaaggaagccaatgcataccaatgaaggccacctgtgggtacagccaagtgtgtacccagatatcaacaagcccactcacagctcagatccctcattggctgaggagttgttaacaatgagtccgagttgctaggtgaaaaaacaaccaggcctgtgccaccctgggcacattcctcacttggcagcctttcaaaccacggttatttaaatatctgtcgaatgtttgctttgcagaaatgggggaaatgtgatcttggaataaaaagtaggagaggactgagagatgtttctgcaggtaaaagtgcttgccttcaaagcctgacaagctgatccaagccctgggacccacagacggaaggaaaaaagcaactcccaaaagctgtcctctggccaggcatggtggtacaggtcttttttttttttttttttttttcctgagacagggtttctctgtgtagctttggagcctatcctggcacttgctctggagaccaggctggcctcaaactcacagagatcagcctgcctctgcctcccgagtgctgggactaaaggcgtgcactgccaatgcccagctacggtacaggtctttaatcctttaataccagcacttggaaaacagaggcaggcagacctctgtgagttcgaacccagactggcctatatagtgagttctaggacagctggactatatatacattgtcaaaaacaaaaaagaaaactgtctctggcacacttgcattgtggcacccatacacacatacattcacacacaggtacatacactagtaaaaaaaataaaaatgtttaaaaaccataggagcctctttatattagagatgtcattttcagaagacacctcttggtgtagacagtataaatcaccgtcagggggagtgccacgtgacagcacaagaagcatttgcacaatgcctggtgtgactgcagcctttgtgcagccgtcagtttgctggtctccagtccacaccctgcagcttgcacctgtgttctgcaaattactcccgatatggtccaggtaagggctcaagaattctgactggggactacagagatgatgctgttgagagcacgtactgctattccagaatcacctcacacaatcaggcagctcccaattgcctgtatctccaggacatttgacaccctctgcaggcacttgcagtcatgtgcagtacaaagcacagcacatacatacacataaaagtaataaaataaaatttaaaactaattctggctgcatcactagataggagccaagttgccaagttacatgttaccaaaaggcaggaaccagaatttactggcaccagatcagaattattccaaggaaaatgtgatgacattttagatccagactgctccctggctgacctgccctttaatcttactctggggacaggtccaggttatcaagttggggggggcagggcaggcaggggaggtcataggaagagagacagagttgctcctgctttttatcacagaagtctggcctcgctcctaggaccacacaacaacctcactcccaccacagagcttttgcaatgtctgaccattctccctgctaggaacattcttttctgtgacatttctcattactagtatttattatttgttggtcatcatctcagtcaatagcagataagcatcagaagagctctgttcaccattgtaccctgtggaagaaggaggctaacacaaaccaccaatagatgtttactgggtaaataagtcaaaagatgaacaatactcttctctgatttcccagctggctgagctcctgggtgggtccttgactctgccctccaggccacctagtgtgactacacttaggttacttagtgtaaggagagttcatagatacgtaatcttttccatcttaatggctttaagggaaggagtgtagttttcatttctactgataggcctaaaacagtttggagttgacttttagggcttggtggcagagcacttacctagcaagcacaagatcctgcgtgccatctctagcagccggtgggggtgggggtatgagaattttaaggctacttgtggtagctcaaacccagcatttgggatgtggaggcaggaggatctggagttcaagaccagcttcataggctagcctagaccgcaagatgagaaagagagagagagagagagagagagagagagagagagagaggtcaaaggaaagagaaaaaggagggaagaggaaggaaggactggagagatggttcagtaggttagttggctaagtagctaagtgaatggcttgcccaaacggtcagggcctgagttctaatcccaatgacctggttaaaaaataataataataactatgggtggagacaggaggattgctgagtcttgctggctgccagcctagctccagatagggtgagagaccttgtctcagggaatcggtagagtgatcgagtgtgcacagcctgcatcctttgaaactggcacaagcactcatacaccacactcaccaaacatgcacaccagaaatgaaactggcttttgtttagctaatggaaaaactaaaaggcccatacctaacgttctttcctgggcccccatctagatgcggcctccggctcacctttgcctctttctcccccccccccccgctccctccccagccactctgatttcactggggccccgcgggcacctccctttagttggctcttcctctgctgcgctaaaatctgggccgctcaatacctgacctagccacaatgccctgatgccctcgaacgggcaggcgtcccttgtatctaagaatctccggaaaagggaattgtgatgaatgaggaggaaggaagcaaaggtctgagaacccaaaggcccggcaagccgacccccccccccgccccagcctggcccccgcgccggcaggatgagtccccggggagcgaaaatgaccgcggataccctttgagacgtgtcctctgccccaggcacactcagcttcctctttcccccctcccaatctagccgaaactggcaaccagacggcggtctgagcaaaaaccccaaccccagactgccttcaaccaaggagctggctgaaactcgaaaggaaccctggacgtgaaatcccgtgggcaacaagggacaggggcggtgcctgcttgcagccatgggaggggtctcccggactttatctctgccttcgtgttcagactctccgcccccgggggaactgttgcatcagcttcaaggttccaaattaaagtgaccaggttgccccgaaagtgacctgagtagtcgccaggaggcagcacttaaccaacaatagaggcgacaggggtgccgcgaaggctgaacttcctagtgcaccgcacctttcatcagacccaggcagagacagatggggagtctgaacctggttaggtggcaaacgcttgtaattccgacactcaggagatggagccacgaggatcagaagttcgaagccatcctccgctacatagcaagtttagggcccaccagtctcaaaaagaaaaaggaaaagaaaaagaaaaaggatgttggagaaccaaagatacagctcattgagagtgcttgcctagtatacatgcgttcctaaaaaaaacaactcgcagagggcttgataaaatgtgtgtctgttgccaggtggtgctgctgcacacctttaatcctagaactccggaggcagagtggatctctgagttcaagaactggtaagttccaggatagccagggctacacagtgaaacccagtcagagaagagagagaaaaaagtctcggctgaatgacatatgtatatatacctgtgtgtaggattgggtgggggtgttcagacatgcagagaccaaaggagtaccatagagagacagggtctctccttggacctgaagttcactatttttgctagctggccagcaagctcccaggacctgcctatttctgttcccccacactaagataataggcttgttgtgccagtcctggttttcaggtgggtgctagagagcattgaagggaaaggattcagttccacagcctactctcacagaataatcagtgcaggattcaccagccaacgttgtgagttcatgtgccatgatgtcaacatacaggtcctggcatctagtccatcaaaaatgctgaaccaaacacaaatgtttcccagtttttcatctgcacttcctgagtacctgagtggttgtatggcaaggacacaatgtttgggaaggtgaaagaccaccagtgtgagcattgcagaagccgtggggtgattttcagaccaggaacagcaaggtcagcaagaagctctccattgtccactgtgaacagctctgaccctttggcctgtgtgcgtctgaaccagcaggccattgctctggagatcaccctccagagcatctgctcacaatagcctatgagccctgtgccctcactgcaattctttgggtttcatatcctcctccgagtctaaccggatggcaaagttaaatttctgattatgaataaaaaataagtagcaaaagggcatctaatttcccagagcaatgtacttgagcgaaagtaacagtgtccagacccacagaacagagagatgtttggataacattgggtgggggttagggggttgagtgcataacaaaatgcaaaagctaaatttagaacttgatgtccttgacttgaaaggcaaaggagtctaggagaggaaacacaggaatctcaaatgcaattttctatagagcttgattctactgttctcagatgaagtgcagagtcagtgtgacaagacagagccactttcctgtggtagacatggctggataagtcattagagaggacactgcagagccagactcaactgtcccataatgttcaaacgccagtggactggagagacggctcagcagttaagagtgctcactgctcttacagaggacccaggttcaattcctaacacccacaaggcagctcacaaccacctggaactccagttatagggaacctgatgccctcttctgacctccaagggctcctgaacacgcatggtatacatacatgcactcgggtacacacacattcataaaaataaataaacatttttttaaatggtggcagcatttaaataaataaataaaggtggcacacacctttatttccaggacttgggaggcagaagcaggaggacttgggaggacaaccagggctgttacacagagaaactgtctcaaaaaaaaaaaaatggtggcaatgttaacagtttatttatttattggtttttcaagacaggtttcttgtgtaaccacctcctggctgcagtctatgtataacctttgttatatcaaactaaccatgtcaaaagctggactttcatttctttcctagagtttctctttcatattttggagttctggtcaaacttcttatctgccctctaaatcctctagcttttactctattgaatgactacacatggcttttgttgttttgtttaacaagatctcactatgcagtcttgactggtctggaactcactctgtaggccaggctggccttgaactcacagagatctgcctgcctctgcctcccgagtgctgggatccaaagcaagtgtgtcacacctggcacatatgcccatttttccatgttttatccccaaaaggcatttcttttttttaaagttttatttatttattaagtatacaacattctgcttccatgtatatctgcacaccagaagagggcaccagatctcataactgatggttgtgagcccccatgtggttgctgggaattgaactcaggacctctggaagagcagtcagtgctcttaacctctgaaccatctctccagttccccccccccctgcaaaggcatttctaacactttgaatgattttgtcaactgatggtatcttccttctgtgtgagctactaagagatgggagagctgctggtccagttcccttattaccaaaggtgatagtatgaagttatcatttcttgcttattactgcagaacatgggcgcttaccctattctgcaagcttctggcttctacttgcttcctcaactgaaaactatgggattccagtgatgtctctggatcaaaggcttagtaacacaaattcaagaacattgtctttcagtctctattctgacactacttataaaaaaagtaaacccatggtcattttgtaggtgtgtgtgctcaagtgttgctagagatcaaaccagggcttcacacagtctaccaatggctacaattctaacagccatcttcatgaatctcccaagtcttttgacaacatcaagaaaagctacaaaagttgctccagcactgtctatcctcctttgtggatcagtgagaaaaacatatgaagttatttatgtagaagttgtttgaaagatttatttttaactatgtgtctgtgtgtgtctctgtgtgggtgtgtacacttgagtgcaggtgtcctcagaggccacatgggtcagatcccctagaacaagagttgcaagtgattctgaggtgcctgatatgggttctgagattcaaactcaggtactcaggtcctttgcaagggtggtagacacggttttgaaaagtaagggtagggagtgggctggagaaatgattcaatggtcaagagcactggctgctcttctatatagacattggttcagttcctagcatcctgtctttgttagggtttctattgctgtgaaggacaccatgaccacagcaactcttctaaaggaaaacattttaattggggctggtttacagttccaatgtttagtccattattatcacagcaggcaacatggcggcatgcaggcagatatgatgctagacaggtagctgagttccacatctggatccacacctactccaacaaggccacacctcctaatagtgccactctctgagcctttaggggccattttcattcaaaccacctcacacccacaggatgattgtcaatgatctgtcactagagttccaagtgatcccatgccttcttctggcttccatgggcactaggcatgcacatggtacacagacatacatataggcaaaatacccaaatacataaaataaatcttttaaaaaagaaaagaaaaatagatgtatggagttaatcaatgagtagagatcacacctagcatggtcaagaccctaaactacaaaagaaaaaacttatatgaatgtacactgaagccaagcctctaatcctggttatttgggaaactgaggcaggctttcttgagattcagagttcaaggccagttggagcaaattaagtgagactctgtctcaaacttaaaaataaaatagtctggagtcaagtgcagtgactcaggaggaggttcgagctagaatatcattgcccagttgaagccaacctggactacacaacgaactctaagccagcctaggcttcagagactccgtctcaaaaaacaaaacaagatttatgaagtagcagccgcagtcctctatgtctgtggcttattttattctaattttgtgatagagttttgtgttgattcttcagacatggtttcaggaaccattgttggccttgaactccttgtcctactggcaccggccaagtgcaatgtcacctcacccagctctcccttgtcttattttgttttgcttgggggcagagtggccatctgaggtgtctagataactttcttttcttcccattccctctttttagttcagttcaaagtacaactgagaaacatctccagtgtaaagacctcccagttctacagaaggagatgattgctggaaacagaccattcctccactctcttgtattctcttgttcttgtcagcatgtatttgtatctgcaacccagtaacgggcacgtttgttgcttcgccataaaggactttgacttacatcatcaccctcaaaatgtcaggaggaccaagagctcaagagttctagatcagcctgggttacatatcaagactctgtctcaaaaggggagtgggagaggttaggaaggaaggagggaggaaagagaaagaaagagggaaaagaaggagaaatgaccccttcaaaggcagaaatatcatggtggtacaaacctgtaatcccagtactctgaggagcactgagggcagccagggttacctagcaggtactgtgtcatccacagcaagaccctatctcaaaggggtggggggtgggcaggtaaggcagagctagctttaaaggttgagtttcctttatttgaaatgcttggtattgttagcctctaatagtcttttttgtcctttcttttttaaataagtgttttgcctgcatgtatacctgcatgccagaagagggcatcagatcccattatagatggttgtgagccaccatgtggttgctgggaattgaactcaggaccagggagagagcaacccatgctcttaacccctggaccatctcaatgacccgtttttttgtttttaatctgaagtgagaagatccattttttctttcttttcccttgagacagggtttctctgtagctttggagcctgtcctggaactcactctgtagaccaggctggccttgaactcacagagattcgcctcctgagtgctgggattaaaggtgtgtgccactaccacacatggctagacatctggggatcttaatcagttttatttcaactgccagttaaagaattaaaactcaggaaaatttcagatgcaataggtagcagcagagaaatcgcaaacatagcaaacaggagcagacagaatcagcaactgaaggtgggcttttattggggtgaggaaacacatatatctgcattcgagacacaggggaaagaccctttggaaagtagagtcggggatccaaaaagccaaactcccaagtcttttctccgggactattttttgtttgtttgtttttcaaagtctctgaagagtttccctcccctaatttggggttggttagtttgaagacaggatggatgattgacccacaactattttgtaacatgtccttatccagccttgaattcatggagccagtccatcaccaggaggcctactaacaagagaaagagcccataaggcccttggtgtaagctgccaggcttttgtctcaggctaggaaaagaagcctggaagttaaacatgtttttagttcttttggtttttcgagaccaagccctgactgtctgtccttgaactcacactgtagacaccaagctggactcaaactcacagagatccacctgcctcttcctcgctggtttttgactaaagttctttcatgactccaggtgttaaattttccattgcagcttcctatttggatttaacaagtttgatatttggagcacttcagagttcagttttcaggtttggaccactcagagtgtatttagctggtgaaaatgtgtcctggacactctaaaaagaggaatcaagccgggtggtggtggagcacatctttaatcccagaacttggaagacagaggcaggcggagctctgtgagttcgagaccagcctggtctacagagctagttccaggacagcctccaaagccacagagaaaccctgtctcaaaaaaacctaaataaataaataggggactcagagccaggaggtggtggcgcacacctttaaaaccagcactcaggaggcggtggcaggtggatctctgcctctacacacagagaaaccccgtctggggggcgggggggggcagtaatcagagctgccgtcatgtttcccagcattcaggaggcagaggcagggggatctctctgagtctacacactgagttccaagacagccatagttacctagtgagactgtctcaaataacaaaataattttagcaccagtacaacttcctcaaaaaagcgtttaacagtgtcctctgcatcgtattccataaatgttctcacaaataacatacacttccccttcccagcactgggctgtgtgtagtcatgtctgtgatcatttgtcttctctagaccccacgctctatctgataaactgttttagctacccttaaaatttcccaaacccactcgctcgtcttcggttctgctggatgagaaccaaacttttctgattcgttctacgcgtgatcatgtcttggtcagaaaacagacgttaaaaccatgcagactgctgcacgacgaggttcgcaggatgctactcttctgagttatcccaaatttccaaagcctggagactgcctacgaaaggtgttgggaacgcagcgaacgagccagccaccggcctcccgaccgcctcgggcgacgcgggacgcttgcgcgggacaattcccccagcccgcagccggcccgcgcttccgtacgctgacccaagatggcggggcccgcggtcgaaaccacaatcaagatgtcggcttccggttttccaggcagcgtcgcgcggggccggcggggccacgcccacttccggcccctttgctgcggcatggcggcgctggggactcggctgtgcagtgagtgacggactgtggggctggggacccgggggccgcggggtggcctgtcctctaactccctgctcttccagtaggtgtccggaggttgcactgcagtgccgcggctcgggccggcagccagtggcgactacagtgagtgccggccagccgggcgggcggccgggcgggcgggggcgcggcgggacctggaagcccgcccgcccgcccgcccgccgcgccctcacccctgtgtttccccacccaggcagggactggctgccagcccttctggctatgggcccctcacggagcttcctgactggactttcgccggtgagccttgatgtcaggtttctcctttttcctctgagagaccgaccgccccggtagggattgggggcgtgtctgggaaaatattgaaccttttacttaggaaaagagtttgcggaaaggagctctaattttgtccgactccagagctgggtgtggtccctcacacctgagatcttcgctttgaggagctgagggatcgctgtgaagtcagtgcaagtatgtgctactacgtagggagtcccagattatcctgaatgagaccctgtgtataaatagacagatagtaaattggctaaggaaggtgagctgtagtgagtggatcatggcttgtagatataattctaacttgggctgtcctggggctggaagggtgcgtgacttttatcttttcagaagggggtatgtgtggtgagtgtatttttatttttattttttttatttttcgagacagggtttctttgtgtagctttggagcctatcctggcactcgctctggagaccaggctggcctcgaactcacagagatctgcctgcctctgcctcccaagtgctgggattaaaggcgtgtgccaccaacacccggctgagtgtattattagaatttgactccacatacacaaggaattctttggaaaggaacaccgaagatccctgcaagactgaagatgacagactcagttcagagaagtcttttttctcttaaaaaaataaaaaagattatggggctggagagatgcctctggttcatgaacttcttcaaaaggaatttggtttctattctcaatacccacatggtggctcataattgtaactccagttccaggggatccaatgccatcttctcacttccacctgtgcctggcacccattcacataaaaataaaaattctttaagaacataaaattaaaaaagagtaatgacacatgtaaccaggaggcaggaggattgagagctagggaacaacagccttggctacctagtgagaccttgcctcaaaattcaaaagtgagcccagaggtggtggcgcacgaacaccgtgccaacactctggtggcataggcaggcggatctctgtaagttcgagaccagcctggtctacaagagctggaacaggacaggctccaaagctacacagagaaaccctgtcttgaaaaacaaaagtgagctgggtggtggtgttggacacctttagtctcagcactcccaaggcagaaacaggatgatatgatctgagctcaaggccagcatggcctacacatcaagttccaggacagccagggatacacagagaaaccccgacttgaaagaaaaaaaaagcccaaacctacatttcattatacagtgagatgaggttcagcaaagactcacattgactgaagggtttctgaagataaaacagtgaaatcagcattgcagatgctaattccatgctagtgacacagctaaatgaaataataggaacatactttggaactcatttttgtgcttctgttgtacctcaccactgaagatgctacatgaatgttagaaaaattaagttgtgaactggtttcttcagtattatttttgatgggcagtgctgggactgtatgtaacctgggcctcacacatgctagcccccagcccagccctgatgggtatgaactggaagaagggagctggagaccgactcttatcaaattcctatcacatcccaatgtttggacaagatgaccagcccacatttaacacttgcctttttcttgcctctatctgtagatggccgtcctgctcccccaatgaagggccaacttcgaagacaagctcagcgggagaagcttgcagtgagtggttggaactccagcaaggctatgtttataatatgtttccaaggaggaaaacttaaatcatcatttatcttgttttctcttaagattaacgtttatatgtatgtgttttgcctctatgaatgtgtgttcaccacatgtgtgcctggtgtctgtagagttcagtggagagtgttagattccctgaaactggaattacagatggttgtgagctgtcatgtgggtgttggtagttgaacctgggtcccatgcaagagcagaaagtactcctaaccactgacccatttctccagccccataaattataatttgtgttgcacctgtgctactgtttggcagtgcttgggatcaaattcagggcttcctgcctgctagacaagtacaccaccagcagctgtatctccagctaattatttatttaagcaaactatatagactaggctgacctcaaactcacaagagatgggcctgcctttgcctccatagtgctagggtcaaaggatacaccaccctacctacccaagccaagtgttttaatggcactgtgggaagggaagactggacattaccccttcgcattgttacttcccttctgtcatgcaaagactggtccaaggcagtcagcagcatcagtatccagcggaaaaccttcgacttccgggaagaaaggatatctgcttaatggtacacttgagccccagatgttatttattcttttcctgtctgtttcagagacgagttgtactgctgacacaagaaatggatgctggattacaggcgtggaagctcaggcagcagaagttggaagaagaaaggaagcaggaaaatgttcttaaacccaaagggatttcactgagcccacttccacatcaataaaaagcagctccgttcccaccttcccagactctctggctttcttttctgtcacctgaatgaatgatttatcccatgcagaatgaagctttttttttactgccatttgtattgacagcaaaagatctcagtcaccaagaggaacttaaaatcactgcctgggaggcttggcccagtgcccttagtcctcactgtattccagttcagccagatcttgctctggggctattattttacccctgatgctagagaacaaaccaagagctgtgcagaagctaaacacgccaccaacctaccatgtagccctgttctgggattttaatcctcccccatgttggccatagggtcaacccaagcagcaggtgctctgtggaggaagaaaaggggcgggaccgttgtccctgcttttaccaacatacctgagtcactcatagcctgtacacagctcagttgtattcagttggcatttgataaatgtttttgatgaaaagggctccccagggcctagagacatggcttatcaattaagagcactgactgcttttccaggggacccaggttcaattcccagcacccatatggtagttcacaactaatttcagtttcaggaaacttgatactcatggcaaaacaccaacgcacataaaataaaggaaatctgtaaatttaaaaagaaaacagggcttttcatctgaggtctttttctttttgagatagggtttcactgtagctctagctggcctaaaactggctatgtacaccaagctatcttgaactcacaaagatcagcctgcctctgggtttaaagccatgtgccaccacacctggcagacacctctgtcttaacaagcaactagtgtccagatacatggcccaggagacacacactccggaaagctgacataggaagaattgaacttgtgtatttagtcttccaccgaaggagttatgttctgactgaattatagaggttggttgaagagggttctgtacttcctgaaccctacacaatgtggcactaaaacccactgtccacctcctgggaacttccagtaacctggcaaccattcattttattgatcatgagccctctcttggattctgaaggcaaggacctttgctcccattccagtgctgaatgtcagggttgcttctttccaccacaaacctggttggtagttctggatgtcgggagcgtcccacctgaccttgtagaaacccctctgcgctactgtttcccttcactagctctccctcccttcctctccccactacctccttcctctggctgaccaaatgcaattcttggatcttacatttcgctgatggtcgagttttctgtctcccacacttttcctgcctctgtcccactgcttggtgtttttccagatccagttctcaacctcttatctctctccctttctcactgccagcttcagcctgtccacctccttccctgcacaccttttgttctccttttgttctcacagcccagccattgcggaagctgtactcttaagaactgtctccagtataaggactgagcaaaaccccaaatcctaactccaaatcctccctcttccaacaattttaatcagacctttatttggctttcccagttctgtgaccttgaaccctttccctaccttggcagttcacacttaatggaactgctagattgcaaaagccattaataaaagtgcgggcccccaaattcaaagtaattgtgattgttgttaggcagtggcttctgttacagtgtaagtttggggcaagaggaggcttgtccacaggtctcagcacacaaccctccttgttagtaaataccccttcctcacagggacactgaaagcttcatgtcaccgccatcactagccatcaggcctcccaatacttaacactctgaagtgagacatgctgaatactacgggaatcaggccacccaaaaaatgcttaggaagagaaagtcttccgcatcccgtcccccgggacacccaggcttctagtcagttgtcggctgtggcctcaacccctgcagatggcagcctgcaccgcagaaagacaacttttttttttttttctccttctctcctgctcttggctgtaattggtttcaggctgaaacaaccacgtccccaccaggaaaggagggcattggggcgggggcggaggagaggctgtgggagaagggagggaccaaaggagagagcagagggcttccaacccagttcgccgactaagcagaagaaagatcaaaaaacggaaaagagaagagcaaacaggcactttcaggagcaatcccctcacctccaagccgactgcgctctaggaatccaaattccgtgcctcccgaagacaaaggcgcccaaagagagcggcggcgcgaccccagggcgtgggccccaccgcggagcccgcaccgcccggcgccccgacgccgcggaccatgtctcccgcccctcgaccctcccgcagcttcctgctccccctgctcacgctcggcaccgcgctcgcctccctcgcctgggcccaaggcagcaacttcagccccgaagtaagtgagctcctccggcccttcccggagttgtgcccgccgtgtaggcgagcccgggggtctccagggggagagcccccgctgaaagcagggctctggggggctctgctgctccggcctttctttcccctccttatgtgcaaacttgcaagtcgatccaacttttgcctgcctccaaccaaccccctccgccgccgccgccgactctttcccattcctcccttccctggaagaactttgcagcggggcccgggcctcgctctcccgggctctgcgcgcactctggcaccaggcaagaacctcataaacactaggctccgcttcaaccccgtgccgtctgggccggtgtcatatgcgagttgttccttcagtttggcagcgctcaggtgcccgcggccctgcacgagcgcgtcggtaccaagtggggcgtcgggggcggccgagcgctacccgcctcccccggaccgccctcggtgcgggccctgggcccgggcgtcgaggatcgcggcgggccgaacttccgcgctcacaaagctcttcttgtgagccgcggggctcagcctgaccaccgcctccccgcgtcctcacccccaatctggcgcctggtggggcgggggggggggactttttgttgctaattgtttctctgcgttaattgcggagagactggggaagagttgctgggcgagtgagttgagggcgggcctggatcaccctcaagcgtccagactgacttgggcgctcccacccccatccctcccatgaccatagcccacccggggccgaaggaagcagtcccgaaggaagcagcgtgggagtagtctgaggaagttttccctccctcacttattttggggtgaaggtgggagatggatttaatcagcttcttattttgggccatccaacccactcatcctggtgaggacctgggtgtggtagggaagggctgggaagggcccaaagtgcagaatatggtctgcatttgactccccctgctctagtcccaggccccggctggatcacacccttcgaggtaacatctcgaggcacagctgcctgtgcccctgaagagacctggggctgaagggacaagtgtggacctaggactgggaccacccttgtgcatggaaactagaaacagagaggaggtgactttctcaggcctgaagctcccatcttagccccaaagagagcgcctaacaaaaggagcctctggaagactgcccactgccaacttcttcccctccccagcctccactaggtcccctaggggaggggcagcagcactggctctgctctaagtgggtcatggtcgtcccagagccagaaccaccatttgcttctggaacacagtagggtgggaagttgagggagggcggggtggacccaggagaggccaggatccaaggcttgctggagagctggagagcccccaccctctgctctctgggccttctacagtgggaggtgttccttgactttctcatagggaataccttgcacttactgatcaagacaatgccagccacctgggacctactacccaacacagttactccttctccaggccaagctgaaggcagaggagaggagaggcagcctaagcctcagacagctaggtccctttccccaggcctctcggctccacactagctccaggacagtgtgtgtgtctggtgtttcacccttcccccactcagccgcagacaccagagtcctctcctgtggttccagtctcatagtctgtggttcttgctttgctcagagcctggctctgtgagacagagaaagaaacttgcccagtccgggaaaggaagaaaatgatggggacgttttctttcctggctttgtgacactcttccggggagtccttttcctgacaaagcatccatttttctccacagggtacagggcagggtttatgagtgtgcttatttaggcctgcctatctatctcttgaaagactggcagggaagggatttacccagagctcctggctgtgtgtgatgcttcccccgccagcctcccctttccatcctcctcttaggagcatgccttcaatttggctaagaggaactcactcctcctgtcttccagctgtggcggggagggggcaggccactcccacccttccttaagccctgttgcagctgttaccccggcaggagtcagagcttacaggtgaggctaggagcaaagggagtttcctacatgcttggcacaggccacagcaggcctcaggagggcactggctgtggcatcagccaacacaggtcagggcaagccttcagatccaagggaacagctctagatttatacaccctgctaggcccctctgacaatcaagaggttaaactcatgtgcccttgaggagggttttgagaaacaggtgatgctagggttgtttggccaggcttattggctgggggaaaggctgggttgtttacagctcaggccctaactcatgtcagccttgaggggaatcacttcctggaactatgtcgcaattcctgcccctgttgggctcaggtcctaagtcagctgctcctgaatcacccccagaccccacacaagagaattctccaccacccatgcctaggcctgaaggggaagcatcatgtggagataaagccatccaatgaccatgggtaggagatgcagcacccaaggcagcttttgccctttcccctccgaatgcccaccgaaggcaacttgaagccccctctgaactccttaaataggtggtgtaggaccagagctacctgggtcatgtctccctatagaagaatccaagcatcttcatagtccatgcataacatggcttgtttggctttccaagcctagattgctaggtcatagagtacttatgtagggttgtggctgattagctaccacctccaaagagcccagcttccccagcagcacccagcctcaaccctaactccttttctagactccttctgtaaaagatctctgctgtgagggtcctagaagtgtggtacctctgttccgggagctcgcttgccctgttcagactccttcaccccaactcttccatactacctatcatggacatgcccctttttcaaatgggacatgccatctttgcaagaactgacagaggagagaagtgctggagaaaatgccagctctaaaaagacattctagagtgtggagatggcttagaaaaatgcttgctttgcaagcttgaggacctgaaataaaaccctaacacccacgtaaaaaaacagatgaggtggcacacacttgtaatctcagcgccggggagacagaggcaggcagttccctgaggcatgctggccatatagcctggtctaatagatgagccacagatccctaaaaaacaagggggacagctcccaaggaacactccagagattaacctttggcttccacatatatgtaagcacaaaccaaaaacatcctaaaactctctcagtccaccagtgctctcatttacaagagtactaaaaccagccaggaccatggctctccacccttacgcctgtctgttccccatcacccctggggacaggtcatactgggatctgggctatagagttcaagtcaacggttagcttgagagttcctgccagaaccagacttggagtctatcatatttctcactaagccaaggacatctgccagacactgtgaagaagcaaggtaggcttcctaggccaagtagaaaattctctaacccacacccttctccctacaggcctggctgcagcaatatggctacctacctccaggagacctgcgtacccatacacaacgatcaccccagtcactctcagctgccattgccgccatgcaaaggttctatggtttgcaagtgacaggcaaggctgatttggacaccatgaagtaagtgcctggcatccactgaccacactgagtactagaaatgctgccacttgaacctgtccctgtgcctgtatcccaaccctcctccatgcacaccgttgcctggcctttcccttcactgacacacacagagccttgcccaacactgatctggggccagaggccaggaccctgggtcaactatagcatccactctctccccttcaaggctttttattttatatattatactgaccccaatgtttccaccctagggccatgaagcgccctcgttgtggtgttccagacaagtttggtactgagatcaaggccaatgttcggaggaagcgctatgccatccagggcctcaaatggcagcataatgagatcactttctggtgagtccaacaacctagagatttttctcccatccgctacccttccctattattgtattatgtagagaaagaaatggcctgcacaagcctcctccattcttagggagtaggaaggaaaatagctctaatcttgcagagaagcacagccatttgggggatgtaccctagtgccaacacccccaagtctttggttcttggagctgagaaatcaaatatgtaatagcagggaaagaaggtctggcaaggtggctgggtagttcagtcagttctgggagagtgcagggaacttttcctcttttatcctaacacttcccttctctatccttgtgtctggatgtcagcatccagaattacacccccaaggtaggcgagtatgccacattcgaggccattagaaaggccttccgagtatgggagagtgcaacgccactgcgcttccgtgaagtgccctatgcctacatccgagagggtcacgagaagcaggctgacatcatgatcttgtttgctgagggtttccacggcgacagtacaccctttgatggtgaagggggcttcctggctcatgcctatttcccaggccccaatattggaggggacacccacttcgattctgctgagccctggactgtccaaaatgaggacctaaatggtgagtaagggaaccctgggtagagtgtgcagtcacttgtatatagaggggtctccttccagaatctaagctagcagggaatagtagccagcctgatctacatagtaagttccagccagccagggctacaatagtgagaccctgtctcataaatcaataaaattgaaaaaaacaaatctaagttctgaggcagaaggattgtgagtttgaggcctacctagactatataccaagacggtctcaaaataaacaaataaaacagctaagtactaaccacacaaacctagagtggaagcaggaattatattttaagctatttatatctgtatatttggtctgctgtcactatccgaatgccttgccaatcacagacataaaagcttccttctcatccacttttgcaggcaaacatgatgcctaccttctgggagcaactgagccccacagtgtaggttttcttgagattggaatcctgccccagatcaccccatttcacccagaggagggtattcactggcttcaggctttctgaaccaaacaggaaactgactctcaagatttgatcactttagatggaaagcgtgaccagcagacttatctgtgaaactgaagtctctggtggggcagcagggagcctaagaagggacccaagctctcaccatctccatccctccaggaaatgatgtcttcctggtagctgtgcatgagttgggccatgctctaggcctggagcattccaacgatccctctgccatcatggcgcccttttaccaatggatggacacagaaaactttgtgctacctgacgacgatcgccgaggcatccagcaactttatggcaagttatccatccccatacctgctcctctgtcactgctcttgtcccttttttgtctctggtctgcatttttccctcccaagtgctgtgaagtctacacaccacattttactgcctctattagctccgattttttttaaagttgtttttatatgtataagtgttattccctctctctctctctctctctctctctctctctctctctctctctctctgtgtgtgtgtgtgtgtgtgtgtgtgtgtgtgtgtgtgtgtacatacaccatgtatatacctggtgcccatggaggccagaagagaacattagaactcctgaaactggcatgtgagtgctggtaccaaacttgggtcctctgcaggaattgcaacagctcctagtgagtcagcctatcacctcccaactcccacttttgagcataggaacatgcccaagctaactacttgaaccttctccaaaaacctgtttacactttttaaaaaatacatttgtttttattagaggggtgtgtgggggggggtgtgtgtgtgggtgtgtgtgtgtgtctacagaggccagaggcatccgatttcctagaattgaggttaaaggctattgtgagccacctgatgtcagtgctaggaaccaaactcacatactctgcaagaacagcatgtgctttaaccgctgagccatctctatagcacctcagccctcttcatgctctctgtctgttaatgtatctatcgttccatcctctctaccccaaagtctgaagtacccctgttgttctcttcctcagggagtaagtcagggtcacccaccaagatgccccctcagcccagaactacctcttggccctctgtcccagataagcccagaaaccccacctatgggcctaacatctgtgatgggaactttgacaccgtggccatgctccgaggagagatgtttgtcttcaaggtgagaggaagagaataaatggaaaggaagaagaagagaaagagaagaaggggccagaaggagtctcagcaaggaagctggtggaagcagtaatagaaggactgaaaactaaaaccataggactgagggcagtgggggagcttggggactgaagacgacaaccaaggtacaagacatgacgtgctctccccatctttactggtttctaggagcgatggttctggcgggtgagaaataaccaagtgatggatggatacccgatgcctattggccagttctggaggggcctgccagcatccatcaatactgcctatgagagaaaggatggcaaatttgtattcttcaaaggtaaccaggcatttcctagactggggaaattgggagggtctccttggatgagctgattccacttcagtcccaaagacttcagagtcaagctgaacccagattcttcccttctctcttatcccaggagacaagcactgggtgtttgacgaggcttccctggaacctgggtaccccaagcacattaaggagctaggccgaggactacctactgacaagattgatgcagctctcttctggatgcccaatggaaagacctatttcttcaggggaaataagtaagacctcgcacccttaaccccaagcctctccactcagaaactattattaccactgccactccaaatatcctcatcgctaaattctgaagaaaggcccactttctccccaaagtgttgccctggaaccagctaagtctttacattgcctagcaataggcagtttttcttagtgctgcctgagtgggatgtgacccggtcatcatttcagacctggtcatttcatgcctcctgcccccagcactgtgtctccaccccagccaccaggctctgtcattaagggtggctggtggctccttacagcctagaccctcccctccacctcctccttccgcctctttcagctgcaggtcctcattactcaaaacccctgtccctaaccatgaccatagctagcctttgtttcctggtgcactctgtcatgggtctgctgacctctgaggacaagcccagtatccaaccacttccctttctctcccatcccccaggtactaccgtttcaatgaggagttcagggccgtggacagcgagtaccctaaaaacatcaaagtctgggaaggaatccctgagtctcccagagggtcgttcatgggtagtgacgaaggtgagtgtgaaaccgtgtacagagaaggatgggcatggggaatgaggaagagcagaaagacagaactaccattgatgatggtagcaattgccaggagccagcaatggtcgattgccaggaactagccaagtgctttcatatgtagtaccccccatcttcccactcttccagcctggtgctgtgatggactcccttttccacttgaggaagcaaatgttgaggaagattgagaagtaagcttagctggccatcacaataacttgctttcttcttttctctctttggggcctttatggactctgtccgggtcttggttcttctcatcttacaccatcctctcggtgcccttcagtcttcacatacttctacaaggggaacaaatactggaaattcaacaaccagaagctgaaagtagagcccgggtaccccaagtcggctctgcgggactggatgggctgcccttcagggggccgacctgatgaggggactgaggaggaaacagaggtgatcattatcgaggtggacgaggagggcggcggagctgtgaatgccgccgctgtcctactgcccgtgctgctgctggtgctggtgctggtggtaggccttgcagttttcttcttcagacgccacgggacccccaagagactgctttactgccagcgttcactgctggacaaggtctgacccccaccgctggcccacccgcttctaccacaaggactttgcccctgaaggccagtggcagcaggtggtggcaggtgggctactcacacccaccctgagccctctccctccagcctcacttctcagtccctgaatggcctctcctaccttcaccccagcattgcttcatccataggtgggacccctgagggcggagcaggaaggcggtcccttctggcctctggccctcgagggaacctcacagcttggtgtgtgtccagccctgtttgaatgttttcagggctctgcacttgaaggcaagaccccctgacctcacaggcaaaggccaggtggggtcatctgcttcttttccatcccctgactatgtaccttaaatctctgaactctgacctcaggaggctctgggtatgtgagccctataagtaccaagtgtacccagttggcagccctcccaccactctaactagaaggaatctgagagtgtgtgtttggaggtggaaagattgctcagctactctaaagacttcaatttaaaaaaaaaaaaaatcattcagtgagggtcttggtggcttggacaaccaagttcctctccacaaagatctgcctctatccatcccagcctggagaacctccaaggagtctgagccattaggactgaatgggtctgaggaaaccgttggcaaagctcgcccctcctgaatgttagccttggatgtcaagttcaaggtcacaagagctgaaagcagggggaatcgccccaggtgcagagaggtcacagggagacagcaggatatggagcatgggggatgagcctggtggctcaaaagacctatccaaatgcaagtagctggggctaggacccaaagacagcagtcaaagggggcaggcaatgaggcgtggtggcagtgtgtgcctgggagcctgggcagactgcagggcacacacaggacactgtggtacccaggagtgggcacattttattggatctctcagagagggtcttaaggaagccacactggcctctttttgactccttgctcactgactggaagggaaggataggagtgaatacaggagtaaaaagagcatatgttacagggactggggactcgagagagaccagaggaggctgtcagtggcctagccttgctcagtctgcctcactgccctagtgaggcaggtgtctgggtgctcctgggtagggtggccctcccttttctgatgcaggcactcctcagcccattttacctgtgtcctgcccttcctcttccccaaccagctgacccatttgaagtctccttcagccactgaaggtggtcatggtactgggggcttgggagagtgagaccctgtggagggcatgagaggagaggagtgtctgggtggggtttggggctagggaaaacggggtgaacggtgctggaagcccagctaaatttctgtcttgtttgggttttttgttttgtttaatgtatatttttattataattattatatatgaatgccattcaaatcgttcctttttgttaacaaggggcaaagggaggggtgggggaggggggcagaggcaactgaccccagaaacctgcagggcggggctgggccagtgccctctaaggacatttttgaccttgttcaacctttccacgaagaataaactgtgtttcacatcctttgtgtgactatagcttggtgtaggggtgaattcggtgtgaccaagcaggatgaggaagagcagacattgagaacagtgtttcccatgatgtgagggcttggtatttgtcataaatatttattctcagtgtatggatgggatttaagagctggagttggggagcaaggcatatcccactagaggttagaggagtgattggcagaacccaccttccttccccagaatccttaaaaggcttcctttgagagtccaggctcccagagataggaggaagtggtcacgctgaggccatctggaaaatcttcctaaattgcattattctgccgtgtgatctggccacagacactcgagtttcctcatacatctatctctgcagcacggatattcccatgatcatattggacggaggcttagtgacaggcctggggaagctgcttctaaatctgagcatggcggggcacacctttaccctcaaccctctggagacagaggcagtcatagttctgggagtttaaggccagcctggtctacagaagtccgttctaggccagctggggctacacagtgagaccctgcctaaaaaagaaaaaaggaggaaaagggggtggttcttacaggcctgggactctgatgttggatcaggagatcaggaaggggccaaaaaaaaaaaaggaggtggccctatggtctcatccactaggcatgtcttaccccctggcagaacagtgtttctcagttgcccagaagacctgggaccctcgggttagaagggtagaataacaaggttttgtttccattgtccatagaaactgctgctctagacagggttcccaggctgttgaccctcccttcctccaaaaccagcctgaagggaggggtcagctcagttgctgagtcagctctgctggaggagagcagtccccttctcccgcctttccttcctgcctcagcccaatcttccctgggctcatgcccaggtcctccacagcctgctttcagagcctggccccacctatgccactcttctatctagctgctctgcagagtggctggcatgattgctttggcagatggggtaccccaccttcctgccagccagcaaccctgaccccaagcatggtcacctgtgcctctcctgccaacagctgtttggcagagcctgtgtgtctctcggtgaagttaggcacaacccccaccaccaccctcaccagaagggattagactgagaaggtggccctgggggaagtcaggggcatctaggggtagtctatgcatgtgacaaaaaactcagaagatgagctcatggcccttttgtgtttttgcggtccacatatggaggcaattacagatgttatccagagggaattctgcaaaacacagctggagccagtggaagagcccaagaggggagactgccagagggaagaggagggggagcctagggctggagtgcggtttccccatcacgaggaaattgtttggctaggattctggaatcacaagatgctctctgaagccaagggggagagatggaaatgcagaattggagacaaaggggggatgagctagaagattgatgctgcacagacaggaccgtggggcaaaagcggagggcctggtgctgatgatgtacttggacccacccactgaactccatgaggttgcccggtgacctcagaagatgccttagtggtcataaggccccacttgagtgagccaccatgtcaggataggatgacaggaggcagagggccctctggctcccaaggacctgcaaactgttttcactggcctggctgatttgtctgctgggcctgacccagtttctatggttccaagttcctttattcgaaagcagcacttgtgagttggggcagccagaaggagccaagtggaatatgtgaggaggttcgggcagccctggggacactggtctaagaagatactggagtgggaacaaaggacaagaaggagcagctctttacccatcaacacaccccacaacctgaagtgggggggtcctctcttttcatcactttccttttccagggatcctgcccccagctggttcaaagctagggaagggaaggccttagaggagccacaccctctgaaagagagtatgagcagagggatgtctctgctcactacaatctggttagccctgctggtccttccctgccccctcccaggacctttcccccacaatctaacagacttcccagccatccttctcccttgcatcctccttgcccttgctgaagccttcactctacagatcaacagaggccctaacacaggctcctttcacagacaaaggaactaagccgtgcaagtcacagttcttgttttttgtgatgttgtttttttaactatttatttcattttgtttgcatgtatgtctgtgtggggtatcagttcccctggaactggagttacagatggttgcgagctgaacttgtgggtgctgggaattgaaccacggtcttctggaaaagcagccaatgctctaaccactgggcaatctctccagcccccaagtcacagttctttagtccaaatttaagccccctatcagggactagggctgtggctcagtggtagaacatttgcctgacatgagcagcactgagtttgattctcagcactgcaaaacaaaacaaaaagcgaagcctccctgggttgttttcctattcaagcacactctgacaaggcctcttgagcaccccttgcagtgtggactcatgcagctagtaacttcacaggagtgtgctctggggagctgtcaggatatctgtgtttgctccatgtgccaggcaacagatctgtggaggcagccagagtggggaaaagagggcatgggggaagctcctcagaaaaggaagccaatttgcagcctaccactttgccggtgttctgaaggaaggtgccacaaaaactcagagactagaggggacaaagtacttgcatacaacagcagtgggaggtgttgacgaacagttgtgcaaagaacaagggaacaccaaagccttcagaggaatgactgccgttcccagaaacccctagaaaactccagccttagctcaggctgttgtcccacagtcccggtacccactttgtacccatccccaatttaagttcatctcctttaggagactaattttctacacctagccctgcccctaggacttcctgcttttttttcccccctcagtcttagggagttggggagacccagtgacagcctgcattggggctaaacagctagggcctggaaggcagcaagcctgattggacagaaaccagcttcccaatgagctcacacacacatactttccatactggcccagcgccaataacttagttccttccaagcctgccttccccagccaggctcaacccccattctgtcctcccttgccactagtcctggaactccacacaggaccattagatacttcagaccagggttgccatcccatccctcggtgggcagcttgctctgcttccgtgatgaggctgggtccccctacaaactgcttatcctctgtcattgaggccttcatggcttaaaagagatccaatacttccagctcacaaagacccatttctggctggggatgtacctcaatgggtagaggacttacctagcctgagttttggatcccaacaccacacaaaacaaggcacacatccgtaaccctagcactctggagatagaagtaggaatatcagaagttccatcctggattacatgagacactgtctaaaagcagagacctactcctgggtagaaaatgacagtacagcaagcagaagaggtggtcctgtagtagatgtcggaagggcatcctctgactgccccaagtagctcactgactcagggaccagacgggcctcagcatgggtcatatcctgttcactcattggatttcccatctcaggcacttccctaactccgggaaggataggtttcagtggggcaacatcaggctgcccacaaaagaggaataaaaactggttccttgcaagttagagaagaagaattaatggaaatgtctctatgacatcacttaagaaaatagacctccccctccccctcaaaaaagaaaaaaagaaaaagaaaatccaggcaatggtggcgtgtgcctttaatcccacacttgggaggcagagacaggtggatctctgtgagttcaaggccaacctggtgagagagttccaggacaggctccaaagctacagaaaaaccccatcttgaaaaacaaaacaaaacaaaaaaattgggccaatatttttagagggtccgtgtgttccccaaattccctccagtagaggtatcaagtacttaaatgctgtagtgtttccttgcttttctttctttttaagatttatttttattttatgtgtctgagtattttgcctggatttaagtgcatcacatgtgggcctgggtcccacagaagccagaagaggacaaggaatttcctggaactggagttacagacaattgtgagcctccatgtgtgctctggaagctgaactcaggtcctctgtgagagcagccagtaacattaaccactgcaccgtccccccagctctgaggcattcctgtttctctgaatgggctcccctgccgtcttgctcattccctgttgtctttaagcttcactttaattgctgtatcagatccccttgtgtaaatatctcacagttttatagattcacatttcactggtatgtggattcaccaggcttggtcatcttaatggagtggagtgatagcacactgtcattttagtttgtatttctatagatcctaatgaggtggagcatcttttttgctcattcatgcttttgtttggttttgttgagataggttctcactatgaacctaagctgtccaagaactcctgatcctcttgtctcaaccttctaaatgctgggattacaggcatgtactgttgcacattcgagtgtaacacacacacacacacacacacacacacacacacacacacacgataatgtgtgcattcatttaaatgtaagatctcatataatgatctctaggtcagtttctgtctcaaaggaacagaagaggggtaaaggcaagaggatcagaagttcatggctatctttggctacatgaggacacaatagtgtgtgtgtgtgtgcgcgcgcgcgcgcgcacgcgcgcgcacatgcgagagcataatgggagtaggcatgcaagcacagcacacaagtggaaatggctctctccttccacttttacatgggttcaggggattgaactccagaagctaggcttacatagcaaatgcttttatctgctgagccatctcatctgtcatatatatatatatatatatatatatatatatacatatatatatatatatatatatatatatatatatataatgcaaatccttttctcagtgttaaaaaaagcaaaaaacaagactggtcactcagaagacttagaagatttgtctacacgccccaggctccagccactttgatcctttgcaatcagagttccccttcactcagcacccagtaacatgtagcagtgggccagaggacaagttcagtccccaaaatggtttctgcatctgctcagtacctggtcttgtgctagcagcatgaagatatgtcttggatacaataagcctctgtgagtatattcaaacatggcagcagattcttatctatctatcacctatgtacccactacctacatatctagacaggatctcaagtagcccaggctggctctgactccttgagtagccaaggatagccatgaacttctgattcttttttgttgttgttgttctgttttattttgttttgttttgttttgtttttcgagacagggtttctctgtgtagctttgtagcctatcctggcactcactctggagaccaggctggccttgaactcacagagatccgcctgcctctgcctccctagtgatgggattaaaggcgtgcgccaccaatgccaggctatgaacttctgattctacccatttgctgttcccttgagatagaatctgacctggagctccaggaatggctctcatgacctgagctcctgcatatacatacatacatacatacatacatacatacacacacatacataatggagcagctgagggtgtagctcagtagtagagcccttgcccagcataaggaagagccttcttgggttgggttcctagtatggaaaaagaaaaggttactgaaagaaatacatccaggtagactcttataccctactttgtcactccaggatatatccccatccactcctggcctgtccttaatctgagttaggccccgttggcccagttcttgagagttcaagcattcaagtgccatggccagcccagccttcacccagtcctggaggccagcagggtttcccttcccacatccttctaatccgtatagcagacatctccaactgtgtcattacactatactgtcctgtgccaaagaggccaacccaacccatacccaccttgggcaagacttcatgtaaattctaccagaagggaagctgggacaggagctagagagcatccatcctactctgtggggctccgcccacctctacagcagaaaccaactgggcagggtttgcagggtggtatcgcccccttgtgttcgatgttaggactggaagtcgaccctggggagcctagaacctagccaggataaagctgttctgagtcaaggaaaccaccaccctccctcccactttctccgtttcctctctagacacctgtacttaaaggggtggaactaagggccagacggggcccacagctgttcttagcctcgcagccacgggggcaaaaagagtttccgtcattgtcctgtcctgggtcccggtgcgggggttgatggtcagccctcactaactccggaacagacagagtgcaggcggtgagggcttcggtccgcaggaggaggctcttctgcaccctcctcagagtttcgagctgtcacactgcccccctgtgggctccttagattctgatcattcttcgacgtctgtgcccgggaccctggggtcagtagtccacctcagactgtattcctgaaccctctctggcatctagcacaaattgcttcataaacgtccttcctcgttgcccttgtctcctgtgaagttagctatcctgccacccgtgagtcatagagtggtgaaggagcaccgaagaccctgacaggcgtcctaaccgacataggccctcagattgtctacctcatctttaatgagcaactaataatacaaggggtgatcgaatagctgaaaaggcgtcgtcatctaagagatgactgtgaccagaagtcactgagttgttgattaattcattccttcatttattcagtcagcaagtattccctgaacaccaacacatgcatcatttgtagtaccaaagacataacagaaagcaaatgatctctgttctcctgggacatctattcttgtcagtagaatgaacagcaaatgtgataaattaggataatatatagtatattggatagcaactcgtactgaggggaaattgtagatgggtgagggagatactgtttcgatgtgattttagagaaggccccactgggatcttgggctattagcaaacaagccatgtagttagttctcaggaagaaccttccaagtaaagggaatagcagatgccgaaagcctgagatgacagcatgcctctcatgaaatccatggggaactaggcagtgcggctggacaggacgagcaaggaagagaactggaagggtggagtcagacaggtaccagtgcaagagaccatagtgccttgtacgtcactataaagatctggctttagtttgtttggttggttgttggtatttggttttgttgatatagggtctcaggtagccaaggctggacttgaactcactttgttaatgtttaactttgaaccatttctcctgcctcagactcctgagtgttggaatcaggcaagttctacgatgtatgacaaaaacttaggcttattctgactaaaaagaagcctttgaagtagaggaagggaaagagaggccatttcagcacattgcaaagagtattatttcaataattcaacgcagtctggtcagaacaactgccactgccacataaagctttctataagccaagacacttaattctttgacattcccatcttcagaagctagaaagactgagatcagtgttaatgaaaacctaagtgcctcagagtagctttagatacatgacggccttttatgaagacttttagggaggtagagctcaaaggttaagagcacttgctgctcttgcagagaatctgggtttcatttccagcactctcatcaagtggctcacaactgcctataaactccaaggatccagcaccctcttctggcctccaaggacacttacatgaatgtgatgcacatacatgcactcaagtacacacataaaataaaaatgggtaaatcttttgtgattttaaaggcaggagtgaagatttctaggaaagggagaatgttttgaactgggagaaaggctatgcttgttatactggagtttaatgagggtggttagcctgaaattgtgttcaaagtaggggacatagctgatgaaagtgaggaaaattcaagtagagtgttgaaggtatctgtgcctgacatctgtggtcctgggcctgggactcacattcggctgttgtctgggtcttagctgggtgcacagtcatctgaaggcttgcctcgagaagactcattccttctgtgcatggcaaatttgctctggaagcagtgggagcttctgttcctgaactgaaggcctgtggggcttcttgagtgtcccaaaacagggcagctagctttcctcagctgaacaatctcaaagacagcacagtggaaggccaatgtcatttgttctgcattactcttggagctacatgctaggttctagtagaaatgagtgactaagtccaacctgtattcaagaaaaaagctgggcagtgatggcatatgccttagatcccagcacttgggaggcagaagcaggcctggcctacagagcgagttccaggacaggctccaaagctacacagagaaaccctgtcttgaaccaccacctccccccaaaaaatcaaaacaataggtgttggagagatagctcagtggttaggagcactttctgctcctctagctagccccaagttctgttcccagcactcattttgggtgattcacaaccacctataactccagctttaggtagattggagccttaggcacctatgagtgtgtgcacgcacgcgcgcgcgcacacacacacacacacacacacacacacacacacacaatttaaataaatcttttaaaaaagaagaaactgaacagggtttcggatgtagctcagaagcagattgtgggcatcgcatgcacgatgccctgagtttcatcccaagcaccacttttagaaccataaaaaaaaaaaaaaaatctgaacaccgctgttctttatcagtctcagagaagaaaattatcccaaggacatttgcaggtacaattttcatttttaaaaataatttatttttactttatgtgcattggtgttttgcctgcaggtatgtctatattaaggcatcagatcccctgaaacagaagttacagacagctgtggactgccatgtaggtgctggaacttgaacctgggtcttctggaagagcatccagtgctcttacctgctgatccatctctccagccccataactttttttttaagatttatttattatgtgtacaacattctgcctccatgtattcctgcatgccaaaaggcagcattaaatctcattatagatggttgtgagccaccatgtggttactgggaattgaactcaagacctctgaaagagcagtcagtgctcttaacctttgagccatctctccagtccccacagccccataacttttattaacaatgccccaggatgattcacaggaatccaccaaagttttctttgaaaaaacttaaatcatttcatttctttcatatgtggggtgtgtgcacatgccacagtgtgtgggagagactcagttctctccatccaccatgcaggtctcagggattgaacttaggttgtcaggctcggccatctcaccaataaaagatccataaagctttaaaagaattatattggcagaatccctgctggcttagcttgaaagaagcaaaaatgatacaaaatgagaagcagtctttgaactgccacattctaaaacaaaaagggaggttgaaaaacctcccagaagacagaaaatgaagagcccactattggagccaagcactctaaaaaattatgctcaggtcttgagttttaataccaatggccaagccatccccttctggcctcgggatatctgtggactagtgagtactttgtatgcctcattcccttttgtgaataggaatacctatggaagttttcctctgcttgtcttgtttcacaccctgccattaggtgttggtaatgggtgggaacaggaagtattaagattctactgtgttcataggtcttcagatcaccacagtctgtaaccaaggagctgtccataaggcactaattaagaagatcccccactgtgcctaggcttattttaaataacaaatcaatggactttaaattgatatgatgatagcttgaaccttttgagtgccccaggagtgttctgctcatctgcgtatgtgggacatgatctgtggggaacagagagtagactgtggtaggcatccttcagggtggacccaatgatctgcatcttttaacatctccactcttacgtagtctcctacagtgcacagggctcccttgtgtaactaaagaatgctgtggaaatgacaacgtatggtatttagttagttttccttttttttgagacaaggtcttcctatgtagtcctgggtagcctggagctcactatgtacactaggatagctttgaattcatacagatctgagatccaccagtttttgcctctgaagtgctggaaataaaggtgtacacagcctcaaagcctatgcccattgacacacaccccctccaacaaggccacaccttctcaaacagttccaccaacttgggaccaaatattcaaacataggaacctatgggagccattatcatccaagacaatgcaatgtttctatgcctgtgtgtgtggtgcatgtggccagattggaagtttgtgcgtcttcctctactgccagtctcaaactcagagatacacttgcctctgcctcccaagtactttgctcggcttctaacttgtctttctacaaacaacacttaagtcatctgatcttggccaggcattggtgtcgaacacctttatttccagtgcttgattggcagaggcaggtggatctctgtgagttcgaggccagcctggtctatagagtgagttccaggacaggctccaaagctacagagaaaccctgtcttgaaaaacaaaaagccatctgaccttaattttttttaacttttatctatttttttagagagggagaggaagagagacagacagagagtgtttataaatggacacatgatggcagatcccaaatgagcccagaatgtggtgtcagatcccctgcagctagattgacaggtggttgtaaagcacctgatatggtgctggaaaccaaattcaggtcctcaggaagaagagttgctgctcttaaccactaattcttctctctagctccttagctgccctttcacaaactggtattttttaataacttttattatttttatttgatgtgcactggtgtttttgcctgcatgtatgtctgtgtgagggtgtccagtctccaggaactggagttatagacagtagtgagctgccatgtgggtgctgggaattgaacccagatcctctggaagagcagctggtgctctgaaccacttggccatcttcccagcctgtaaactggtatttttttaaccaaagtgcaggagtttgcctttttgtctctctggcattgtaaacactttggtctgtcatttgaggctgtcaggttctgcaccttcctggggttggagagatggcccagtgggagtattcctaaatcttctgttgctgtgataaagtaaaccgacaaaggcaacttaaggggaaaagggtttcttttggctcacagtgcaagggtacaggccacgatggcaagcaaatcctggtggcagtagcttgaggcagctggccacataaaatgacagtcagaaagcagggtacctaggatttctggcactcagggagctttcttcttatgcagtccagggttcaattgcaggcaatgtgggtcttcctgtctcaactaatctaacaaaaataatccctttacagccctaggtagaggctaacaatctaaaccatccctcacaggtatatctggaggcctatctcctaggtgactccacgagagttatcaacagtactaaccatagcacagggtaaagaactcactactgagactggatctccaaacccccctgagaagcagaatcccagaaagctcgaagccagcaagcctactgtaacaaggtgagcatgaagaccaacccaggaggagactgtctctgacctccacactcacacagtgccacgcatacatctatatacatataaccatatacataaccaaaaagaatctttttttttttttttgagacagggtttcaaattgaacccaagtcctctggaggagcaaccagtgctcttaacctctgagctgtctctccagcccctaatgtttatatgttgacgggctctcctaactggcatcaattctaatgtgtttactttgcatacattctttagcctgaaaccgacacttgtgctatcattcagtctgaacttccttcctattgcctctaatcagatagtctaaatatatgatactacccaagtaatactccccaaaagagaatgaggtgtctagttttggtgaactatgccacatactagtgatcactactggtcacagaaacagccattcaaaatagtcgaggagtgtcccgcgcgctcgctctgtatttctcgccagcaagaaatcatacgcaggacactcggatccttctgcaggaaagctttaatgcgtcttgagaggagagcataagcttaccagagcggagaccctgaaccaagaagcccgtcccctaataaaggagggcaaccgccgccttggacatgtcaccccatgattggctgcagctcatccggccatatgacgccacggaataggcagagatcaaggaatggaaatttacccagcgcctgcgcaataatcttgtttacattcggtgcctgccggatgcaggcgccatcttgtaatggagaatgcagggacggctccctacagaggaggagaaaattgggctcacacactttggtcacaagacaaggagaaatcaagttggcactgaccaggaagcttcctgcccactgggtagcttctatagtactggaaggtgctcttcagactgctgtgctaaagtcatatctaaccatagcacagggtaaagaactcacttctgagactggatctccaccccacccccacccccgccctgagaagcagaatcccagatagctcacagccagcaagcctactgtaacaaggtgagcatgaagaccaactcttggcactggggtggaggaggcagaaggtgagtagttcaaggccatcctcagctatatgagactctgctttaaaacattaagaagaggagctggagaggcggctcagcacataagagtgattgctgctcttccagagggcagtacccagcacccacatctggcaacttacaattgtatgtcactccagccacagagaatctgatgcctgcttctggcctcttcggacactcacacactcatactcacatacataaataaaaataaatcttgggtataaaaaaaagaaatgggtagtgtatgggagaaacatggacagacaaaattaaattgctaagacactgaaaggagatatgagatagtcagagaagctgaggaacaaaggaaggaggtggtaaaaccagggtggttagaggctaaactgcccaaccagagctagaaccagggcagatagctcctgctgcacccaaagctgaaacagggctttagggccctccttcctcctccctgcgaggcaacccccccatccccccatcttccccctgatagctgaagattctaaaatcaaccatgccatgtttgagtctggtccaggcacctggactgagtcttgttggctgagtctagctcttttacatgctaagagtttgatttagaacaagttatctcaactatttgtgactcagtttcctcaattataaaatgaggataaaaacaacactggcttcccagaggtgtggccacctttcagtgagataatatatgtaaagtgctatgaacaatgcctggcatatgtgagtaatccctagaagcacgaaaatatttgttggcatttattattatgtatgtgtaagtgtatgtggttccatgtatgccacagcacacaggtagacggaattccttcatgcttcctatataccttgcaagtagcctggagataagtttaaacaatatttttagcaattctgcaggtgaaacaggtttcactgagtgtaatttcttacctgtggtgctatgttggtgctcaagtgatttaaaattgtgggagtgtttcagatttgaattttcagattaggatgttcatcttggggaaaatacttaacgtctccatgcctacacttcatctgtaagatggaagtcaccaccgaatctatctcacaggactgctgactggaggagcagacatctccctgttaaatatttactatgtgtatactaaacgtttacttaggaataagcctgaaatgtgggaaaacctcaacttgttactctttgtaaatattacccacctgtgccacagggaaccagggaccaccttaagcccacaatttattttatttttttttttttaatttttttttttttcgagacagggtttgtctgtgcaactgccctgactgtcctggaactccactctgtagaccaggctgaccctgaactcagatctgccttcctctgcctccctagtgctgaaattaaaggtgtgagccatcactgcccggcttgggttttgtttgtttgtttgtttgtttggctggttaagcccacaaaatttaacaatacctcctgtgactgagaagaatagctgctctcggacaggagcacttcatttcctgtctgccaatgtgcttagggctcaattacatattatttccctaaatgttcacaagtaccataggagggagctgcactatcatgatcctcaattttataggactgctgaatggaggagtaattttctcaagttcacggaaccagcaagtgctgaagccatatttaccatttgttgcgtacggagtctcagcaggggagtaagcttcactgttgggaagaaagcacacagtcaaggctccagcctacaggaagtgtcagtttccaaagctggggcgggggcgggagtgataaacaaacactgtaagagataattataatagcgcctggtaattgctacagtacaggcttgctaccagaagggccacggaatctcaagcgctgggtcaagaaaaagtactgagaactcaagtgtccaaagacacttaagaggtgcgggtaaagcaggtctcctttgacatcgtgttacaagacgcgatctggaaaataaccccggccgcaggcaaaaggctaaccagagcgggactgcaaaaggaacccggaaaggggctgagcgcgggtgggcggggccgcgcggtgactggcaggggtggggccaggctggccgcgcccctcgtcgccggctgctgggcttcggccggggtcggctaggcttggtgagctgagcaaagccgccttcccgctcccctgggggccgcgggaaccaagcagcgcgccggctcggggacggacagcccacaaagtttggtccgcggagggcgcagcttcgagccccgcaggtgcggccgggcctggccggggcgctcgcggccttgcgggcgagcacggccgggcaccggcgaggagcgatcaactctgaagttggcaagaggtgacgcccgtgctccgctccgccgcgcgtccagccctggcatctcgagcctgggtcgcgccggggctatgcagcccccgccaggcggccccgcggagctccctgccaggtagacgagcggcgccccgggaccctgccgccacctctgctcggctcaggatgctgccggccctcccccttctcctcctcctcctcctcctcggtaagagtccctgccccgctgtcattgcccgccgtcccgcgccctccagggcgaccccggctgctgcgaacgccgccgcgtccagccttggcccctctcgggttttcccacttcgtctgtcccacccacagccaaggaaggcgacctttcagcgaggtcatgcacctccttccggctcctctacctcttcctataaactacccggaagtctcagatgggcctgctcctggagttgcccaggtgaagaaaacttgtgactcactctgctgccctttctcgattccccctctaggaggtgctctggctcgtccagaccgggtcactttcccaaatcctggtgagtacagaacgaaggtgcacccaagagaaaagactgtcccctgaattctgaaataagaatggggagccatccattattttacaagagaggaaactgaggcccatcgttggcatgcacccggtagttgttatgaactcagtttttacatgtaatttccgtgttttgtctccctagttagggtaaggttttcctaaaagtagaagcagtatttcttctgcctactggccctatggctgacacagagcctaccttagcgttacttacagtgttacttacggcattgatatttaaggcaaagtatgaaaaatatgaaaaggagacacttggagacagaggcaggaggattagtacaaggccagccccagccacatggtaactttgagactagactaggctatatatgatgttatctttaaataaagaatggagaggaagagagagattaccagggttggaacttgtgggcaggggtctctgtacctccttgaggcatccagagatagcaagcctggggaggggcagagtgttaaagggctctaccagtatcccaaccttcttcctccagcttgtgagagccccccagcagtgctcttggaagtacagggcactttacagaggcctctgggcagggacagccgaagctctcctgccaactgcacctgggttatcctgggcagcaaggaacagacagtgactgtcaggtgagagacaaggcaagtccctatttctctgtactgtcccttccctctccctctgaaaagtcatagattgcttctctatggtgtttccatccttgtccacaggagaatagaatttggtttgacagggtctgctcctaaagcttagctcctagatcagtgatagcaaattgaagctgggctgtggtggagatgtttagcacgggcactggccatctccaaaggactctagagactattctgggctcaactagacttgtgatgcatcctctaacccatagcatagcctcattgttcattggcttagaaccttcctcaggggctgggactgggactgggactgtattaatacctcattggtggatcacttgtgtagggtgtgcagaagtctggattcagcccctaccaaaacaaaccttcccaggtctgcctttctgcattgctcgtgctccaacggtactctccctctcctcccatcttcttccctcacccctcctacttttccttctcttctctcctccccctggctctcctttcttgctgttgcttgtttttgagacagaatgtcactacgtagcccagagtagcctacgcttctttcatctcatccttccaagtttgggggtttccggtggagtcaccatgcccagtatttttttcctttctggttgtttttgtttcatttatttttgctttcggtactaggatacaactcagggtttcacacatcctgggtgagtattctatctctaaggagcaatcccagccctttaccccaaatctactaatgttctaagtctcatcattggagcccgtgccaactggcagcttgcctcacacacttcacttgataagaatttacccagagccagacagtggtggcctgtgcttttaatcccagcactcaggagtcagaggcaggtagatcactgtgagttccaggctagcctggtctatagagcgagttccaggacagtcagggcaacacagagaaaaaaccctgtgttgggaaaaacaaaacaaaacaaaaaccaaaaagaacatatccaaaaaggtgcatgaagaagagaaccatctaaagaggctgttgcgacccaggggacagccacggaggtctcagattttacctctcctcaggttgtagagctgagctgttgtgtgttgtggttaactgaactactgtacattttgtcaactaactgctgggcaccgtacttggacagtgatattgcaacatctggagaataataaccctgatcttactacttaggacttttaacaagcctggtcagtccctgaacacagtcagttttcccagagggatggggggggggtgatcctgtggtttgatggtgccactggcctctgttggaacttttcccattgattatatttactgccaaaggattggctgagttttcatttggatctttgaatcgtagataagcaggagtttgtgcttcttagtctaccagggacctgtcatcaagaggggagggaaacgccagggtgttggtggcacacacctttaattctagcactggggaggcagaggcaggtggatctctgggagtttgaggccagcctggtctacagagtgagttccaggacagcctccaaagccacagagaaaccctgtctcaaaaaaccaaaaaaaaaaaaaaaagggggggtgtggagggagctagcaaaaatcttgaacatctcatgtcctgctcttctgttccttacaggttccagaagctgcacctggcctgtggttcagagcatttactcctgcgctcccctctccagccaccagtctccctgtgtgaggctcctgccagccctttgcaacttccagggggcaatgccaccatcacatacagctatgctggggccagagcacccatgggccagggcttcttgctgtcttatagtcaaggtaggctaaatggggagtgccctgggaccattagaagtggacatcccagggaagaggcaaggatccctgagttctggtgcttcaccatctctttgatgtctctgcagattggctcctgtgcctgcaggaagagttccagtgcttgaaccaccgctgtataccagctgctcagcgctgtgatgggatcgatgcctgtggtgatggctctgatgaggcaggttgcagctcagatccattccctaacctgaacccagcccctgtcccaactccaccctgcaatctcaccttggaggacttttatggggtcttctcctcccctggatattcacacctggcctcagtctcccacccccagtcctgcctgtggctgctggacccccacgatggcaggaggcttgcagtacgcttcacagccctggacttgggttatggagatgccgtgcatgtatatgatggtgctgggccacctgacaccccgagactgctacgtagtctcacccacttcagcaatggcaaggctgtcactgtggagaccctgtctggtcaggctgttgtgtcctaccacacagttgcttggagcagtggtcggggctttaatgctacctaccatgttcggggatactgtttaccttgggataggccctgtggcttgggctcaggcctgggggctggtgaaaatctaggtgagcgctgttacagtgaggcgcagcgctgtgatggctcatgggactgcgctgacggcacagatgaggagggttgccctggctgcccacccgggcattacccctgtggagctgctggcacccctggtgccacagcctgctacctgcctgccgaccgctgcaactaccagacattctgtgctgatggagcagatgaaaggcgctgccggcattgccagccaggcaacttccgctgccgggatgagaagtgtgtgtatgagacatgggtgtgtgatggacagccagactgtactgacggcagtgacgagtgggactgctcctacgccctgccccgaaaggtcatcacagcggcagttattggcagcctagtgtgtggcctgttgctggtcatcgctctgggctgcacctgcaaactctatgccattcgcacccaggaatacaggtcagttggagtggggctggctgtggcggaatggggactgagggtcagatggggccagtgctgttcctggagactgagcaggcccacctttgagggcctgcgatgagtttgtgagagtagtctcaaggaaggaagggagttgactttggacaaaccatggcataactccatctgccctggcctgggtatggaggggagaggccttctaggcttaggtacattaccctcactgggagtgactagtgactgagaggccctccttcttctagcatatttgcccccctctcccggatggaggctgagatcgtgcagcagcaggcacctccttcttacgggcaacttattgcccagggtgccatcccacctgtagaagacttccctacagagaaccctaacgatgtaagtcattcttccaaccttggatctcatatgccagccttgtaccctactatggccccatccccgtaccatgcatcatccagccatttgaccccctgactctgatgtctgcctcctctccttgcagaactctgtgctagggaacctgcgttctctgctccagatcttgcgccaagatatgactccaggaggtcattcagggggccgccgtcgccagcggggccgctcggtgcgtcgtctggttcgccgtctccgtcgttggggcctacttcctcgaaccaataccccagctcggacccctgagaccagatcccaggtcacagcatctgctgctccctctgaggccctggatgacagcacaggccaaagctgtgagggcggagcagtaggaggacaggatggggagcaggctcctccactacccgtcaagccccccatcccaaccccaagcacacttccagcccttgctactgtctctgagcccccaggacctctcccctcagtgcctctagaaccctcactgctgtctggagttgtacaggtcctccgaggccgtctgctacccagcctgtggcccccaggacccacttggaccccagctggacatcacacaacagtcctggccccagaggatgaggatgatgtgttgttaatgccgctggctgagccagaggtctgggtggtggaggcagaggatgagcccctgctggcctgagggagccgtggggctccagacacaatgctatgatcctttggaagtggctaggcttctccactgtgctatctggtgcagaaagttaggtgtcctccaggcagggagagccccttctgtgtatgactagaggctcaaccaccaccgtctgcccatcctgctgtccaggtgactgtgttaagaaaggttcccaaaagatcataggcttggacactccatccttccccacccaaaagtggccttaagtaccagactgcagttgcctagaaatcttctatcccctaagtgggggatttggccagggtgatggttttgccagcttccagttctatggtgcctggcccacttagagaacacaagtgcttttgtcccctagctgcatcattgcctaggaaataaaggaaaaaataaaaaataaatttcagcccttggtaaattagccgtgagcttcatcctgcctctccgcccgtctcttcctctcgcttcgctcctcctccagaggctttggatcagccttctcctttattagcactcttcctgtttacttttcaactgcctaccttccctctttatgctacttaggaggcagaacaattcaaggaaccctgaggactaaccatctccatcttcattctctggcccagccttacactgactggtatgaggctcagcagcaagcccgaactcactgcaggccagaagctggagccagctgagccctgaagtcaagaaagggtccatttatggaatcctttcagagcacagatcacagctgcagtctgttccctgataaaaccccaggagacactcttcactctccaccgcagccaggcaagagaggtgcactctcggcctaggcccttcacagcaggtagagaagctgaagaaaagtaagtttgagattgtgaaagtgctggcatgacagaccagatcaagggggtcttcctggaggagggtccaagctgagttctcagccatgctatcagcagtaagctgaattctaggcaggacaagcagaaaaaaaacatggaggccagatccagcctcagtggagcccaagcagaggtcacagcagaagctctatggatgggagatgaggggatgccatgggaggagatgagatgggggagtgttgaaaccctacctctattgagcacactgcctcagagtttcaaagtccccaagaaactggcttctccagcctctcccttcttagggccctcaacaactcagatgagggataccctaaggtctgacctcaccctcagcagagatggctgtcaggtagggatcttatacttctccctctgggcactccttcccacaaagataatccttgcacactagtccagctttcattgtggagtgagccccaggacagccagggctacacagagaaatgctgtctcaaaaaaggaagtagtcaagctggaggtgtactccagctccagtgcgtctccccatggtcacctcagaccctgctgactgagaccttaatccctggacccctccaaatttccctttctggaatggcaggagattaaggtgagggctcctggttggggtgcatcagcacattggctggaacactggaaagtaagagttcagtagggaggtctgtagatcattgtacctggaagtttatcctgttcatttatgtatatgagtgctctgttgactataccagaagagggcatcagatccctctatcagatcctaccatgtggttgccgagaattgaactcaggacctcagccagtgctcttaaccactgagccatttctccagcaaccgccaccatccccctgtgccttttttttttaattgtctttgaaaaacaaacaaacaaacaaaaagactatctcagacctaccaagtgctgaaattataggcatgtaaccacagcaggtttatgcagtactggggcttgaagccagggcttcataactgctaggtctgattgatggttaatctgggctgtggactagttcctcctgggaaccctgactaatacattagacacgcactctaccaacagctcaaatttactttgaccaaggcccaaggggttggggggaaagttgtgttactgtagcaaacaacagagacaaccagtttacaaaaaaagaaggtaagaatgtacacacatagtcttagctcatgcaaaggaggctgaggcaggattgtcatgagttcaatgccagcctaagctacaaagcaagatacttctcacaaagttattttggtttgcagtaatctttggagattttgctctgtggtgctgtttgatgaggggcgcaccacacatggcagagactcatggcatagtaaaatcactcactaatgtgaactgtaggggcaaggaagaggccagggtgccacatccccctcggaggctgtcctagttatggttactattgctataatgaaagaccatgaccaaaagcaagttgaagaaagggtttattcagcttacacttccacatcactgttcattgaaagatgtcaggatgacaggtggtgatggtgcacgcctttaatcctagcactcaggaggcagaggtagggggatctctgtgagttcgagaccagcctggtctgtaagagctagttccaggacaggctccaaagccacagagaaaccctgtctcaaaaacaaaacaacaacaacaaatcccagcactcaggaggcagtggcaggcagatctttgtgaggttgaggcctggtctacagagtgagttccaggacagccagggctacacggaggaaccctgtctcaaaagacttgagggggagcgggagcagaagaaggaggaggaggaggggaagtagtagtagtcaggacaggaactcttaacagggcagaacctggaagctgatgcagaggccattgtgtgtgtggggggggggaggctactgggaactgcttactggcttgtgcctcatggcttggtcaacctactttattatagaacccaggacccaacctgcccagggatggtaccacccacaatgggctgggccctccccccatcaatcactaagaaaataccctgtgctgggcgttggtggcacacacctttaatcccagcactaaagaggcagagacaggcagatctctgtgagtttgaggccagcctggtctacagtagagtgagctccaggacagccaaggctacccagagaaactccatatcaattcctccccttccccaaaaaaggaaaggaaaatgccctacagctggacacacacacacacacacacacacacacacacacacacacacacacgattcatggctggtatgaagaggcagaatccagtaagaaacctgccaggatttatagttttgactcacttttacatagtatcgaagaaatgaattcaagcacccaagtgcattctgcaggtaagtaaagcttgggtctttaggatgtcttctgagtttagtattgagtcttgctggagagccagccaactccataatcctgccttagcctctagagtggtgtttctcaacctgtggatcataacccctttgggtagaatgaccctttcacagaggtcacctgagaccattggaaaacacagatacttacattaggattcataacagtaccaaaattacagttatgaagtagtaataaaaataattttatggttggggtcaccacaacatgaggaaatgtattaaaaggtcacagcattaggaaagttgagaaccactgttctaagaaaaattatagatgtgagaccatacccaactacttatttaaaacttaaaaccaaagctggagacgtaactcagtggtatcaggcttatcttacatatatgacgtcctacatttgatccccagaactgaaaaaacaaaactataaaagataaaacaggctggtgagatgactcagtgagtaaaagcacttgctaccaagcctgacaacctgagttcaatacccagaacccatagtgggagtagagaatagctcccaagttggcctctaacctctctacatgaatgcaactgcgtacgcctgtcctagacatacacaaaaaataagtgcaaaaatgaaaaaaaaaaatccaggcatggtggcacacgtgtctaactgcagcattcgggaggctgaagcaaaaggacagcttgaggaacagttccagaactgccaaggtaagatccaagaaaccaaacacacacacacacacacacacacacacacacacacacacacacacacacacacacacactcacacacacactcgggaaaagggtcgagcagagggtgatgctggagagatgggtcagaggttaaaagtacttgctggtcttccagaggtcctgaatttgatctccagtcacaagagctccaggggatttgacaccctcttctggcccctgcaggcacctacatacatgtggcacacacattcatacacacatctgaaatgtaagactttccagaaggctaagaatcacccatagaaacccatggctaccaaggtcactgctccaagtgtgcttctatcacagaatatacttcgtatatcagaagtgtagatcaagtgtcactcacattagtttcagttgtcaaaactgaaactagaacaatagctgattggagactgaaggtccctacggaattaaggggatgggttgtgttagctccttctgatcctgccctggggctgatcagtggtgttacacatgttcccaggattactaatcatttcttctatggaaaagtccactgagtggcaagatatatcaccaataaaagaaggttgcaaggggtgttggagagatgacttagtgtctaagagcactgactgcccttccagaggacccaggttcaattcccagcaaccacatggtggctcacagctatctgcaactccagttccagagaacctgacgctctcaccagacatacatgccggcaaaacaccaatgcacataaaataaaaaccaaattaaaaggaaaacaacaatgcaggcttttgggttggagagatggctcagatgattaagagcactgactgtccttccagaggacccaggttcaattcccagcacccacatggcagctcataaatgtaactccagtttcagggactccaacaccttcacaaagacatacatgcaggcaagacatgagtgaaatatgaaatatgaataaatgaaataaaaataaagtatttaaaaaggttgcagatatttcagagaaggcaagcagctttgtgtagaaatggggggaggcttcttggcattgggaagataaggatgggaatcctagtggcacttgcatggtgctttggggacaggccacccaccaaccactctaaacctttgcatgaaaaggaagagaggtaacacagaagagtacttggcaaaatagggcgaagcagagaggtgggtgattgggtgcttaagggtctgcagaacccggatggaagggagctgggcagacaaggattagtcggggagttgtggttctagcttcccatagatgctgcccatcagtcagctttgtctccgcttgctgctgctgcctaacactggctgcatggacctagcagagagagaaggtgaaggcaaaatgaagctgcaggaagagcttcctcagagctctcctctgccccaggtcttttgtagttcttactccaaaaggggcagagtgaaggaggtagacagcaccagggaagccattccccagcttccccatctctcggtccatttctttgtcaagttagtctaaagtctgtcacctttttagccactaagcatccaccctgaactggacagtgagatggggttggaaacaaaagtcctctggcttccagggtccctgcctcctgacaccctcagctcctttatccacaggcccctttctccacactgccctctgaaaccttctcttctgcctcatgactgctccgttcagccttaatcaggctgtgcctgtgcagtgagtatgctcccagagggaagtgacacaaagaaaaaggagggggacagaaggagggaatcccgcttacatcactgctcattagcatatgtgacctcatcaggaggcgggacaatttccccaggtgtctgagggggggcagagaacagggtggggggggcagtatttaaagggaaaagctgacagtgctgctgagtgaggaaccggtgctgtgagccgctgggctgcactcgcacatgcacgccggtgcacacggaccttgacaccaacatggacacggacacagaaaccacagcactttgttcttccagcagccgccaggcctccccaccggggacacccacaccaggtgagcgctaaacggagtaggatgcgggctgaagccatgggtggggagctaaagctttgtgggaaggtcagtgccagggttcattgagaagggggggaaaatgcagccaaggagacccctgcacttttgaggtctggacagccaagggggagggggaaagctgcccaggtgcccctcccccaacacgcccagggctttgctagagaaactggtacttggcccctaggttaacctcatccctgataagcagagccggccaggagggaagggggaaagaaaggggcagcccgcaaacctaggaatcaccagctgagggggcttccctggggacctgttgtaagggtttcttctggctccatctttggctgccagccaaatattgatcctgtgctatttatagcctggctccatccccctttgttgtgtctgttgttgttcctctagttaccccaaccctggaattgtcatcttcctcacacacacactctccacctctacctccccacaaacacaatatcctctcccactcactgggacaggcaaaaatccaggagtcgtctctctcacacacaaacatgcgcgggtgttgctcactacctgcggggacacaggaaacagcacactccccttctccagcccccagacctgggaacaaggcccctggaaagtttctgattctgccaacacctgccaacagctctgtttgaggaccgaggtgcaggaagcaataggagggagggcccgttagcggacagatgaattgcttcccagttccacctggttcaggggcctagtctaggggtgtgcctgtgtcagtgtacgctgtgaatggtgtgtgaccctgtgcacaagtgcctgtcctacacagcacatattttgaacaggtcgtggccaggatcctacaagggggaaaccatcatgctagctccttgagggttcatcattttgggtttctgggtaattttagtacaagaggctggactaatgactctcagttcttttgggatcatggtctttatctgctctgaagaagcaacctaaactgaccccttggcagatacctagctatcacactatagcttccttttctctccctctctagaagcagataccacgcttctgaaacagaagccagagaaactgttggcagagttggaccggagtgggccacctcctgtccctggggcccccagacgaagaggaagcatgcctgtaccctacaaacaccagctgcggcggggccaagctgtcgatgaacttgactggccacctcaggcctcatcctctggctcctctgagtccttgggctcaggggacgcaggctccacccaaaaggatggcgtctttaaggtcatgctcctgggggagagtggcgtgggcaagagcacgctagcaggcacttttggaggtctccagggagacagtgctcatgagatggagaactcaggtatttgggggtgccctgtagagctggaagtgtttctggtgtgaatagacattcgaagacaggacctaaaagaaatttccccagtgatttctgtggtagtctccccagggaggggttccctgctgttgggagctaaggtgttcctggttaccaggtctcacaagtgttggggaatctcctcataggttttattctctttcccaacagaggacacttatgagagacgaatcatggtggacaaagaagaagtgactttaattgtttatgacatttgggaacaggtgaggactaagatgtggccctcggtgagcaggggaagggcagtctggctggggctgctgacattgcccccatcctggctccagcatgagctggaacatgacttggcactgtcgtatctccaggagcaaaggcccaccttggtatgcctatcatggctcatggccgtgatagccacagttttttgggacctttgagctcagacaaaagttagaatgtgaatttgacaaactcttcagcatggagtcagggtagaaacacagaaactgacccatttgtaaattcttcagcctggaagtctgatgtaaaggagaatgtgggggcttctgaatacttgatcatgttactgtgtaggaagaacaggctaagttctgttacttttaagttttctagctctttatttgggggaacagggtctcacagtgtagcccacactagactggatcgaacaactctcttcttgcctcagcctgctgtgtgggggataacaggtttacaacatgctgggaaccgaactcgagactttgtgcacactaggcaagcactttaccagttgtgccatatcgcaagcctccacatattccttaataacaatcttttctaaatcaagagcttaagcctaagaaagtagaccgttagcctactatgagatcctatttccctagttctcccacgtgggactcacatcactaacttctccatcctccacaaggcccctgggtatcaaaattctgccattaactagccctgcgttctaagcaagtggcctgtctcacattcggatccctcttcgctgagacgcaggttccagtctctatgcctagcatcttatgctctagcatcttatggctctctgctcctctgcagggggatgcaggaggatggctgcaggaccactgccttcagacgggggatgcctttctcatcgtcttctcagtcacggatcgacgaagcttctccaaagttcctgaaacccttcttcggctccgggctggaaggccccaccacgacctacctgtcatccttgttggaaacaagagtgacctagcccgctcccgggaggtatcactggagggtgtgtatcctgaacccattgtgtacttgaaatctcaagagatgactttccaggcccttcctccccgggaggccttttactcctccctggtgtacgatcgcatgcatttagtccctgggttagggaacagccccactacccagccgctggggtccttcactagccctcattgctcctgctaggtgtcctcccttttcgcacctctgtcgtagggagttgggattcggtggtcccacccctatctcccgccccacctgtgcaggcccaccctagccacgggcaaagctgcccatcgggcaggcgggcgggcgcctgagccgcttccttcctgcagagggtcgccacctggccgggacgctgagctgcaagcacatcgagacgtcggccgcactgcaccacaacactcgtgagctcttcgagggcgccgtgcgccagatccggctgcggcggggccgggcccgtgccgggggccagagacccgagcctggcagccccgacggccccgcgccgcccacgcgccgcgagagcctcaccaagaaggccaaacgcttcctcgccaacctggtgccgcgcaacgccaagttcttcaagcaacgctccaggtcgtgccacgacctttccgtgctctgagccgcggtcgccatggccactgccgtcgccatggtcaccgtgccctccgctcgccccctcgccctactcctgtccgtctaggaaaccaaaaattcccaggatgccctggtgtgagcgggaggcggggccgggtggctggtctgtccaccgcctccacgccgggtctgaactgctgaccacctacagcgcctcaagacctgcgagtcagggaagaaatccgtgctgcaaggtattttttattatcattaactcacaagagaccacctctcctggcaagagactccaaaaacactggaaccggaaaagtgctttgtagcctcctggatggagttgacctccttggtattctgaacatgccttacctttaagcaagttttaaaggtaaaaacccagagatgactcttccagagataactgaaaatgttctctgatccgccgcccaggcccacttggcccttaagaagttcttaaaggaaagggcctggaagttattcttgagattggactctgacttaccattctactatggcacgctccctccctttaaggttattgaagttaaggtgtgggcagactctctgccttttagatgtcctaaagtagagctgagtgctggcaacccctttggccagggcctaggaggcaccagcaagggaccctcctttccccttccaataaaattttttttctattcactatgttcatcttggctttctgttctggtagttccagagaaagagttgtgagggaaagctcctgttacaggcaggaaaactcgggggggggggggctgagacatcattaggaaagacccacaactgacttggccctggggcaagccctcaacaatgagacagcaggtctggagagaaacactcagtgataccagagtcctaggcttcagttctgggtcccaacttttgtcctactttatcctacagggagcagctggggcggccacctttagctccagagtcacccagctttgacttgggttggctcaaggtggagattatgtccctcagggatgcccattagctggagcaggttagggtgggcttgtgccttccctggcagggccccacagctccagctgtcacctgcaaagcccgtgtgagaactgaagctgtcactgcctcctctggggacacccacgcctgctgctgccagagccatgagtttgaacaaagagagcagaggcagcagctctcctcacctctagacatttagttcagctacctgaatgctggcaagccaggcccccaacccaccatatgcagcatgctagaacctgggagaatgaggggcttcctaagtaaatccttgtagctaaggagcagggcagcccagcagagggtgaggtgagaatgcaaatgacagaattatccttaggaagagattatttgttaattctttagagaccttataaggggttgctgtctgttttacagtggaagaacccattccagcagcttgtccagtaaatagcaaggcgggggctccaccctttagctgctctggttctacacagatgggatagaaggacagggagaggccgagccacgtagtggccgtactgaaaatcgggggtatcacctggctatagccgtagtgcaataagaactctggagttcagattttaaactgcaggaaaacacacagggccaaaaagggaccagatggttgtgcatttgggttgaaacctcagggacatgaagaggagggtaagagatgagcacaggaaagatttggagcccgaccacaaaggaccttaaatgtcagcaaagagcttgtgcctaactgcaggaagtgagtcactgaaggtctttgcatgtgtaacatattagcaatggcccttggagagttgtgcacggactgggagggcagtgagtggtgagaactgtggaactgacttcagggctagaaacagtgatgcccatggaggtaatctgggccaccctaggcgctggcagtagcaaagcacaagcatggggtggcaggccacacattatgggacttagtccagctctcaggagactgagcaggagggtaataagaggatcatatgagtttaaaccaagcccgagccacacagagccaaagactgtctagtatcccaaccttcctcctctacctccaaggatttcaatgacagatgtcaactaccatgcctggctttattgggcactgtggattgaacctaaggcttcatgcatactaggaaaacattctctcaactacattcccagccttggtttattttttactttttaaaaattggaactggagaaatggctcagtagttaagagtaccagctgctctcccaaaggacccaggttcagttcccaacacccacatggcagcagctcacagccgcctgtaacttcagttccaaggaatttgacaccctcgcctgatctctgtggggaccaggtatgtaagtggtatggtacatacatacatgcaggccaaacacttatacacacaaaataataaactaataaaatgtattatttcatttacttgtgtactggggtataagcaaaccatggcatgcatgtggtgaacagcttgtaggagctggttttctccttccaccataagggtcctggggattgaacacagcctatcaggctgtggcatgtgcctttattcactgagctatctcagcagatcctagtcttgttttgagacagggtctcccactgcaccccaggcttccctgtacttccagaaatcctcttgtctcagcctcatggaacaacaagtataaactaccacatctagttttgaattttttaaaaaaatattttattcttggggctggagagagggctcagaggttaagagcactagcagctcttctagaggtcctcagttcaatttccagcaaccacatgatggctcacaaccatctataatgacatctggtgctctcttctggtgtacaggcatacatgcagatagaacactgtatacataatagataaataaaaatttaaaaaaatattttattcttattttctgtgaatgggtgttttgcccaaatgtatgtcagtactttgtgtgcatgcaatgcctgtggagtccacaagagggcactggatgccctggagctggagttagacagttaccagccaccgtgtgggtgctacggacagcaccaaggtcctctgcaagagccgccagtgctcttaattgctgagctgcctcaccaaacccctggctttaatcccagccttcaggaggcagaggcagatggatctctgtaagcttgaggctagcctggtctacagagtgaattccaggtcagttagggctacatagtaagaccctgtctcaagaataaacaaataaagccaggcggtggtggcacatgcctttgatgccagcacctgggaggcagaagtaggtggatctctgtgatttcaaggccagcctggtctacagagcgagttccgggacagcaggggctacacagagagaccctgtctcagaaaaaaaaaaaaaaaaaaaaaaaaaaaaaaaaggataaggaacaacaaaggtccagtatcatgagatcttcaagcatgaatattgcatattgaaagtgatggcaggacctcccccaggaggagagccacataacacaaacctccctccaactcagccagtcccatcagccagacccatctgtgtgttccctccagacgcctacgagaaagagctcagaacagacagaagctaaagccaagcttccaccagccttgggagaggtaaggtcttctctcagagcccagccattttccctctgcccaacacaaagtagagctgttggcctggatagagatgctgtcagcaactagtcttggggcccaagttgcctgtggcggagtcagatgccctcagagctcttaaccacggtagttaggtcttgaagtccatgttcccccactatctcctaccatccgtgtagctctgtccacaaggcttcctcagtgtccagaccttgtgtgcttccctttgactggccaaagaaagagggcgattcttttccatttcagccttttgctacagttgtgacatgcggctctgaagaggggctctcctttctgaaagggtgctagcattgtggggagaagtcctctgggaatcccaggaagcccacacatcttctttgttaatctagcagtttcagtccacaccaatctaaagtatatttttctgagaatttaatgtttcagccacaaatgtttgaagacattttgttcccctcgtgtagtaagcacatgcaatacaccatgcactacgctaggaaggcagacacatgcaagacacaatctcagggcctcaaggagctctcagttacagctggaaacttgggcaagatgccgacagtgctaaaagaggtcaaaagctgcagccgctacaacacactcctgtgagctatgttttgtgctctaggtattctagaattaggaactggacctaaaaggatatgcaggattgggtctacatactgagtgccaggacaactagggctacatagtgagaccctgtctcaaacactcacacacagaaacacatacacagacacacagacagacagacagacagacagacagacagacacacacacacacacacacacacacacacacacacacacacacacacacacgactggcaaaagaaagaaaaacattcattgtaaaatataagagtgccaggcatggtggctcacacctttaatgccagcacacagaaagcagaggcagacagatctctgtgatttcgaggtcaacctggtctatatagtaagttccaggacagtcagggctacgcagagaaaccctgtctaggaaaaacacaacacaagagagtgcatggaggagctcacttcgtccctgtgtagaatgcaataaaatcggggtagatggtgatgctgggctgtccagaagtctaagaagcagacaggggcagcctccttcccaatcctgtggtcctggctcactgatggagacgcccaaggtcctgcccatctatttgactgtttttcttttgaacacagggtctgagacatgctaggcaagcactctgccacaaatctggacttccctttttgttacaaagaaaaaaaactgtaaataataaagttttgttgctgttgttgtttttggtttttcaagacagggtttctctgtgtagctttggagcctgtcctggaactctctctgtagaccaggctggcctcaaactcaaagagatccacctgcctctgcctcctgaatgctgggattgaagacatgcgccaccaatgcccagcttaaagtttatttttattacatttatttacatgtctgtggctgtgtgtatgtatgcatacaaaaatgcatggcacacatgtggaggccagaggataacttgtgggaatctgttttctctgtctaccacatgtttccctaggatggcactcagttcatcaggcttggtagcaaataccttacctgctgggccacctggctgccccgtatgtgttgtcttcatttctaaatttttatttttaattttccaaaaagaaatttagactggctccacctcagttgcccaggctggcctttcactcaccttgtagcccaggcaaactctgacttagcaaacattctgactcatacttcactccctggaattatgggcctataccatcagcctgacttcatgcacttgaatacagatgtccagcagccatagctggctggctttgtaaaactcaagctttgaatatgaattcagtttagtcttgcaggcttttcagttagccctcaggatgccaccctctttacgtttctgaactttatctatatcactgttatgaaatgaagatggtaagggacctattggaagggaagtcatgaggaataaaaacaaggacagctgggaggctggagtggggaggaatgaggcagaggcaggtagatctgtgggatttcctggcctgccagccttattggtgagctccaggccagtgaacagccctgctcaaaggtcaagatgggaggcccctgagaagcaacaactgaggttgacctttggcatgcacatatggacacacacacacacacacacacacacacacacacacacacacacacacacacacgactagggatgtaatccaccccagcactgggagaattaaaaaaataaaaataagaagccaagtaaaaaagcaaagatctttaaacacaaagtatagtactactctggagatacaaatgagcttcccagcacaccctcctgtgggatgcacaggcaaacgcagtcctggggttggtggcttggggaagttttagggaaaaggctaaattctgtttcgtgttgtaaatcagagcttgtctttagacaggatttctctgtgtatccctggcagtcctagaactcactctgtagaccaggttggcctccaactcacaaagatcctcttgcttctgtctcctgaatattgggataaaaggcatgcgccaccactgcccagggacctgacctgtgctgacttaaaatacttactaggctgggcagtggtggtacatgcctttaatcccagcacttgagaggcagaagtaggaggatctcttgagttggagaccaacctgatctacagagtcagttccaggacagccaagactattacacagagaaaccctgtaaccctgtctcaaaaaaaaaaaaaaaaaaaaacaagcaaacaaacacatacctattagaaagaaatttgccaggtgagaaccagactctgggaacccacaagcaggtgctgtatgtttgtggaaggtgcacaggctactggaaaagggctgtaacagtctttctaccttcaagaccaaccaaagcacagacactagatagatacctaggtggggctcaccgtgagttttcaaagccatcttcgttgtgatctgcctgtacagagcttcaggcatagaatggtcaggtaggtgtgattgttttcccattaattaggctagctggacacatacaggacttgagactttaactaggaactcattaattgcattatttcccactcacccttctccccatatattttttaaaagattttatttattatgtatacagcattctgcttccgtgtatatctgcacaccagaagagggcaccagatctcattacggatggttgtaagccaccatgtggttgctgggaattgaactcaggacctctggaagtgcagtcagtgctcttaacctctgagccatatctccagcccctccccttgtattttgagtattttctggagtgagaatgaggttcagtgggccatcaactgagtcggcatccagaggcgtgggaatgatgacagtaacagactatcaagttctaaagtctttgtgcttagcatctcacttcgttctcgggacacatttaggaaataggcactccataattcccttttacagatgggcaatctgaggcaaatgaaagatttgagcatagtcagagactggggatagaggaggaacctgaaacacgtagttcgtgtgcctgcagaatggccctgtagtcaacaagaactgacttcttcagtgtaaggttgaagaggagtctaaactccagcaccctttattctaaacaaccaggcttccgaatgcttaagcaccgcccgggacatatcctttctagaacactggcaaacatttgacaagtgtctgatttccaaggtcatgctttcccctttctaagcccagtgctgactggctcctttccagtcctcatccatctacccattgctctaaaaacaaaagtgcctaatggctctgcagtaacttcagccaactgctcagggctcttgagtacagatcatctggaacagacagctgagcacccaactttaaaagtggttttggagcctgccatgctagcgcacgtatttaaacccagcactcaggagacagaggcaggtggatctctgagttcaaggccagcctggtctacagagtgagttccagaacagccagggatacacagagaaaccctgactctaaaaacaaaacaaacaacaacaacatagtggtcttggagcagagcttccctcacttctgctctcccccatgatgtaagtcggtcatcagctttgcctcacatctttacagggatctcagtcaggcaaagcctcaaaagcaagtcaggtctggatgctgggtccaaacgctgcaagcaaagagaaaggaagaccgaaactagaagattcagacacacaactcagaccaaaatcccttcttgtacccagctcatccagcaagtgccttcacctggttgctatggaaatatcagtctctggtggatggcaagcagcacttcacaagtatcacaagctaccatggtaacaccaaaaacagtagagatgtatcatctctcctgaaggagaaaggaatggatgggatgatgcttctggggggaaactaaactagaagagagtttttggaaagcctgcctctgactctgagtgggcattagttcaataaacatatcctatgtgtatagcaaaagacataatgaaaaagatgtgtatagcttcaccagactaaaaatactgaagaataatttgcaaagaactgtaaatgcagaatgagccatgtactcacacctgtaaccccaacagtcagaggccgaggtggaactcctgctgaatattcagggccagcctgggctaccataaaaccatacctcaaaaatccaaaaccatccagtgagccagctcagtggatgaaatcacttgccactatgcctgacaaccagagtttgatgcccaggactgacatagtggaaagaaagaactaactcccacaagtcatcttctgatcccacatgtgttctccaccccctcaacacaaacacacagacacagacacacacaaacacacagacacagacacagacacacacacacacacacacacacacacacacacaaaactattgactgccattttagttccatgttcagtgagagactttatctctatggaataaggcataaggtgatagaacaggacactgagccatcctctagtctccacacacatgcacagacttgcacagccacttgaacacacacacacacacacacagagagagagagagagagagagagagagagtcaaccaagaacagtggatgtagataaaagtggcacttgcctggtaactccaaggcttccacttattgatggacaagtgcgaatgaatagttagaggatcgtttgtttgtttgtttttctaggcagggtttctctgtgtagcagccctggctgtcctggaactagctctgtagaccaggttggtctcaaactcaagagatccacctgcttctgcctcctgagtgttgggattaaaggtatgtgccaccactgcctggctagttagaggatcatgaagccacaccaattatattggaatcaagtttgccaacagattgtggggcaagtctctgtctagtctctctctctctctctctctctctatatatatatatatatatatatatatatatatatatatatatatatgcatcactgtatcactggtgaagtttttattaaatccacagaatttttaaaagttaatctcttcacacctgttaccttgtttacaatgtagaagagacaatttactttaatcagttgtaaagattaagtgaataaacacagtagttagaattattctgttagtagtgcaagatggcacacaactttaatcccaacagctcttgggaagagaggcaagtgaatctctgtagtttgaggctagcctggtacacagtgaattctaggacagccatgactacataatgagaccctgactcaaaacaaacaaaatatacagcaagctgcaaggcaaacaactgtaaactcagcatttgggatactaatacatgttaattgcagcaagtgaagccagcctgggctacacagtgagttctgtgcaaactttgcactacagtgtgaggccctgtctacacaggcatgcacgagtgtgaacacacacacacacacacacacacacacacacacacacacagtagaagcctggcctagtgaaccattgtaatcccagaactcaagaggccgaagagacgactcagcagttatgagcactggctactcttacagaggacctgagtttggttcccagcatctacatggtgtctcataaccatctttaatgcaggtccagaggatccaattccctcttttggcttcttcaggcatcaggttcacacattgtgcaaagcgcccacacatataaaatgagagaattttacaagaggctgaagcaggactgctctgagtttgaggccagccaagctacatagcaaaattttgtttcaaatgaaagaacatagctttttagagatttatcagagatttatcgtgtgtgtgtgtgtgtgtgtgtgtgtgtgtgtgtgtgtgtgtgtgtgtgtgtgtgaatgttacctgtgtttgggtatcctaggaggtcaaaaagacctcctcagagcccctggatttggagttacaggcggttgtaagctattcaacatggtgctaggcatcaaagtgctgcccggaagaacagaaagtgctcttcacccctgagccagccctccagctccagaacacagcaaatcaaagaatggtattgtcattgccttagaggagacacacacagactatgaaactgccctggttagttttgccagcaactttacacacctaggaagaggaaacctcaaccgaagaattgcctggctcagactggcctctagttacatcagtgaagagttttctcaattgctaatttatgcaggagggcccagcccactgtaggtggtgtcatccctagctaggcaagtcagcctgggctatagaagagaggtagatgagcaaaccagggaagcaagccagtaagccttccgtctatggtttctgtttcaagtgcctgccttgtctcccctcgatggtagacgacatcattgatgaaataggaccttccctccctaagttgcttgtggatagtgtttaatcaaaacaatagtgaaccctcctacaacagagccccaggccaagtgagaagcctacttagaacgggggtttgtgggaaaaattctaactctactgggaaaggacctggttcacagtctcacccaatccctcccacccactcttgctaaggtgggacaactggagggagggttcttccctcttggcctggacggaaactgttccttgcctgcttctctctactctaaccaccccctacagagggatgagtaacacagtgctgagtcacgcacaatgacaccagctgctacctactagatattgccaccttatatggggtaaaagtacagcaaaagttgtctttaatgtttccttacacccatccccgtctttctctccacaagaagctgtatgatgaattaagagtggagtaacagaaggctgaggtagaagtcccagtgttctggaaggataactagctctggatgggatattaggaaaatcaaacaggaataagagcccatctaagaaggggcaggaa

SEQ ID NO: 20 - DNA, 46709 bp, Cricetulus griseus
  >scaffold_12 dna:scaffold scaffold:CHOK1GS_HDv1:scaffold_12:27781971:27828679:1
cgaaaaatcgggggtaaaaagtaaccctccccctatttttttcttttttagtctgggtctcatggagcccaggctgcccttaaacttaaggtgtgttagccaagggtgaccccgaacctctgattctcttacctccaactttcaagtgctgagattacaggatgtgccaccacacactaccgtttattcggggctggggatccaactggagctctccagtatgctaagcactataccaaatgaactacaccttcagctctccaactccatggatcctccgtgatcccaaagttttcgctaaagcaccaaaagatggcggggccgtacccacccattccgtacagtgtgtgggcctcaggctgtctccactccttgctgccccagaagacacacaattaagagtggaggccttttgcaaggcggacaggacgtgcacagatccgggacgctcagcgagagggacgccaggcctgagtcacgttacctccgcttaaccttcccaagggcatctgtcctcccgggcctgagaaggggccagccggccaccaccgtctattgaggggcggaggtcaaaaggattctcctgcaagcgaaatcagccaaagaagcctgactcccaaatccaagaggcgacctggacaaaccactggcaggagggcaaaacacccgggacccaacaacagaagggtagggggctaggggcaggttacccgaaggaacttcatggccaccaggcggaaccccttctgctcgaagcgcttgatgatatcgcccaccaggccacgctgtacgccatctggcttgatggcaatgaaggtacgctcgaggttggccatggtcctgctggggcaagaagtgcagttgaagaggcctggccaaaccaagccggcccaagaggccacgtgggctcccgcctccgccaccgccgccgctgcggaggacacgtggctttccgggtacttcttccccacccaagatgcccaggaaggggaccgtggtagcctgaggtggggtgatgttgggtggagagtgcatcccagccttaccgaaagtcggctggtccgccggtatctgcgataaacggtgagagcacagaccagagcgaccaccggccggcgcagggcaaaggaggaggggctgagggcgggacgagggacgccacaccccggaggacccgctgcccaacccgggacgctcagccggtttaatctgccagtagtctctgtccccgcccagcggcccgcggtgcacgcctttgccttgcttaggctactgagggctgagaggcaggaagtgatttgtcccacacctaagtactcctgcgtttaccagggacctgctacttactggtcctgaattcttttttcgtttgtttgtttttttgtgtttttcgagacagggcttctctgtgtagctttggaccctgtcctggaactcgctctttagaactggctggcctcgaactcggagttccgcctgtctctgcctctaccaccaccgcccagcttggtccttaattctttattcctagagacatctgcattcacccttcccaggggcaccagcacccagcaggcctctccccgccctagggtacccccaagtccttcccacctctgaaaaccaaccctctattccttcccctctgcttgagttcttagccttcctcatccaaaatgacagcttccctaggagccaagtctgtcctcagccccctcctcagaaggccatctgttcatgtctgtgtctcagaatgacttcgcagttcctaagatagcccatgccttttgatctgcccaggatctgccccctgctgtttgtctcccacctaccttttcagcttccatcagacaccctgttcccacctagagactgggttcaccacccacccagcacaacccacttcttcctgagccactcctggcaaccctggagtttccaaaagttgactgcctgcctgtacttcagagagaattcaagacctgcctggacgatttagcacacagtattcccatctcaaaagaagcaaagccaggcgtgatagatgacagatgcctgtaactctaggtaggggagcaggaactcaaggacagccactgctacacagttcaaagtcaacatagtctatatctcaaaatacacaaaatgaggtgttagagagatgatttagcagttaagagctcttgctgctgttccaaaaaaaaaaaaaaaaaaaaaaaaaaaaaaaaaaaaaaaaaaaaaaaaaaaaaaagttcagtacacagcacccacacacttcaggtaactcacaactgtaactctagttccaggggatctgatgtctctcatctccgaggccaaaggccctcatgcagcacacatacacacacctatatgtaattaaaaaaaaaaaaaaaacaataaaagaagggcatggtagcagatgctttcatgggttggcaagggctcttacacattgaaaccctacctcgacaaaccaaaataataaaaaatgaaaataactctttaagctaggcagtggttgcacacacctttaattctagcacttgggaagcagaggcaagcaggtctgtgtgaggccagcctggtctacagaaagttccagaacagtcagggttgcacagagaaaccttgccttgaaaaaccaaaataaatagtaagtaaatctttgagaaatatatacataatgagaggctggagatgaagttcttttaggactttcgtggcatacacaaggccctgggtttgacccttaacaccacataaactaggtatggtggtgcatccttgtcaaccctggaattagagaccagctagactacatgaggttggggaggactgaaaattgagctctgtggtaagcccactagtgtaacatgcacaaggccttagggccaacctccagtattccaaacagattttatgttctgagaagccaggccagtcagtttgaagacattcctcatctcctgtctgctttgcaaaccaccagcaccctaaaggttcccacccatgtccactgcttcatttctgtgtccaaagggaaatcatagatagaaccagctgcctcttctcccagtgggattagagcttgagctggggccttgaacatccccggtaagaggtttagggtgttgcccaaaacactgagaccagcccagatgagtcaacatgtctaaaaccctcccccaactccattccatcacctctggctaaggagctgctcacattgaacatctctttgctcactgaccattaagttgagtgaatatactctaaattcccttcatacaggctttgtactgggcaccctggcctacattttctttcttttttttttttttttttttttgatttccaacaagtgctatgttttggaatgaactgaggacatacccagctttaatggttatctgcttctctgaaggaacaagctagcccttctctcatgttctctatgacaccaacacaacagcactcactatctcagatgggagtccctctcaggagtctgctaacctcaaaactgaggctatcatcatcgtggctccagccaactgatcacctgtaagtaatcagatagataatgaatagcctcatcaccatcctatcccaaacctcagttaacaaagcatcagcctaggaacactagcaataactggcaccagcccccattctggggccatttccttcactatttgcctagttggtctgctggttagttttttaagataacctcactgcatagtcatggctagactacaccaacctggcctcaagcttgctgcaatcctcctgcgtcttcttcctaaatgctaggattataggcatgtaccaccacagtctgttttggagttgccaaatgtcaactgtcctgagagtctggaaattcactggatgtttctgttgtggaatattatttcttgatgtgtcacattaatttatgctgtgggacatttgtttaatgatgcaaagatgtgttgcattcttttatgttgcatttgtttaactgtgttcagggaccaactccccatttcggcagccatgacagtaacacgtgcttgccatgaccttgtcctagtcactagaagtcagatgcctgcctcatggcaaggaaccaatcagaagttagctggtggtgctatgctttacggctcagggtgtgctttacgaataagtgcacagcaatgatgcaaagagcatagcaaccaccctgggagggcctatgggccataacaaccaattggccaatcaacacagggcaagccctccaagcccagaggcacaccaatcctgagcctgtgtgtacccctagacactccccttacgctgccctataaggtctctatgcagatggttcaagctgtctttgctagccatccgccatggcgggtgggtgaaagacccgagctaacatggggttagctcattaaacaccaataaagcctcatgcagtttgcagcaagttttcaaatctgcctggtgactggggtgactgcagtcctgggctgggaccccggaggcctgagttttcctggggtctaacatgtgaagctgtgttactttgcctggctaaaacacctgattggtctaataaagagctgaactgccaataggcagaagaaaggatgggggtgggaaataggggtgggtgggtggcagctgctaggcagaaagaataaatagtaggaaaaatcttcaaggagggaggagtagatctggaagcaagagagggaggaggactcgaggagcctgtcacccagctatacagcaagacacagagtaacaagtaaaacaaggtatatagaaatagaaaaggtaaaagcccagaggcaaaagatagatgggataatttatgaaaagctgcaagaaacaagctgagctaaggctggtaattttaagaaagaataagactctgtgtggtttatttgggagctgtggggtgggccaccaaagagccaaaagtgaaaaaaccaactacagtatctatctaccattaccccttaatgaggtcacatacctccctaccctatgatagtagtcactaccacttcatatgacaccaactgatgatcccaggcttacaaaagacatggttttcttatttgagggtagctacaacttctcacaattccctctttctttttttaaacactttatttatttatatgtgctttgttgttttgtctgcatatttgtctgtatgagggtgtcagatcactggaactggagttacatacagttgtgagcttatacatgggtgctgggaattaaactcttcctctggaagagcagccaatgctcttaaccgttgagccacctctccagccccacccctttctttttggtttttcaagacagggtttctctgtgtagccctggctgtcctggaactcactctgtagaccaggttgacctcgagctcataatcctcctacctctgtctcctgagtgttgggattacaagcctgagctaacatgcgtgagttggcatctttatttctgatgaatcctctgttcccagcacaattttatggacctcacataccctctacagaaattcctcactggctcactgccaagaatgaacaggggtgcaggggataaaaagaaagataggcaaagatacctatgcatcccaggatggtggctcaaacctcaaggacaaccaagagtctctatgtgtatgtgaggccaatgtaagtaatttgcataccatttacgtcctgtccgttcaggttatccagaagcctgaggaggaagtaaagcatgcaaacccacacagcaatacaaagtaactagctgacccaatactggagatgaaacactttaatcaaccagtggcacttaacactgcagaggaaatcacagctcccagaggttccttccaggtcaaaggaagttccaggaatatctagagttgctggtcccttgcctgtaagaataggggtaagtagaggggaaaagcaggtgccctcctgtcactcatagatccagttttgtgcacagctcttgtaatccaccagctcctcaggctgaaaccacaagccgatctccttctctgcactctccacagaatcgctgccatgaatgatgttcctgggtggggagagatactgcatcattaccaaaaccagaaagatgaaattgcccacagtatcctgcattcccactgctgagacccaaaagccatggcagcagaaaagccagagtccctaatacttcagaacacgttaaaagaaaaatcatagaatgacttcctgtgagtggccctcccagaaaccctgacacaagagtgtgagccttcagaaaggctctagccaggctctacattcaagaaaggtataggcaatgggatgaagacaagcaaacacaggggaccctccaagtcagcctccaccttcagaggcagaagacaaaactcccatttaaaagtgacctgagccaagaagtgatggctcacacatttaatcccagcactcaggaagcagaggcaggagaatctctgagttcaaggccagcctggtctatagatcaagttccaagacagccagggctacacagagaaaccctgtctcaaaaaaaaaaaaaaaaaaagaaagaaagaaagaaagaaagaaagaaagaaagaaagaaagaaaggaaggaaggaaggaaggaaggggaggaggggaggagaggaagagacagaaagaaaaaagaaaaaggaaagagaaaggaagaaagggagggagggagggaggaaaggagggagggaaagagaaagaaaaaagaaaaagaaaggaaagagaaagaaagaaagaaagaaagaaagaaagaaagaaagaaagaaagagagagagagagagggggagggagggaaagaggaagaaaaggaaggaaggaaggatggaaggaaggaaggaaggaaggaagggagaaaggaaggaaggaaagaaggaaggaaggaaggagggagaaagaaaagactatcaggaattcaaggatagcaattttgaggccagctagcatacttaagacattgtctcaaaagcagctaaacttgcctggtggtagtggcggcagcacatgcttttatttaatcccagcacttgggaggcagaagcagacagaactctgtgagttcaaggccaacagctagttccaggacagccaaggctacacagagaaatcctatctcaaactatcaaaggcaaccaaacaaacaaaacaactaaaataggggcagaggagatgcctttaagagcactggctagtcctccagagaatctgggtttagttcccaccatccacatgaggctcacaactatctgtaactccatttctgggggatccaatgccttgttctagcctccttgggcaccaagaaatatacagacaaaaaaaactgtccatatacatgaagaacaagtaaaaaataaaataagctttaaggctaaaatagggctggagagatggctcagaggtttaagagcactggctgctcttccagaggtcctgagttcagttcccagcaaccacatggtggctcacaaccaactgtaatgagatctggtgcccttttctggtgtgcagacatacatgcgggcagaacactgcgtacataataaataaataaatctttaaaagctaaaataaaataaatagggggctagaaagatgactcggtgattaaaagcactgactgatcttccaggggtcctgagttcaactcccagcaatcacatagtggcttacaaccactatgaggctgggtgccctcttctggcctgcaggcatacatgtaggcaaaacactatatacataataaataaataatcttgctgggcattggtggcgcacgcctttaatcccagcacttgggaggcagaggcaggtggatctctgtgagatcgaggccagcctggtctccagagtgagtgccatgataggctccaaagctacaaagagaaaccctgtctcgaaaaaacctaaataaataaataaataaataatctttaaaataaaaataaattgacctgcagatgctatcatgtccatttctagcctcagaggcccaaattcttgtagcaactaacttggattttggaaaaaagtgaaaaacaccaattcttacctgccaacttggatgcaaaagtctcctcgaatggtcccaggtttagagtctgcagggttggtctctccaagcatcacccggcctgtcttcacaacattcaacccctcccagacctccaaaggacaagagaagacacagtcaaggaagaaaaacttagtagaaaacctggcatctagtgattctaaacaaaagaaaaaggctccagaattgggtcctctcattcactagattaaacagaatgcctacttgttccaggactagggattctggtcaccctgcccctactcttatccttcccagattcattcatgtgatagccagtggccttttgaaatgctaaatattgccattgaggtaatcccaccactccagaggtagaggcaggtggatctctgtaaagccagcctggtccacataagagagtcccaggaaagaccctattttggagaccccaagatgttggagatgccagagtcatgggatacctgccaagaaaagctgcataaggggtgtggaaccagctcaggagctaaaagtatatggcagtcaataaaactgaaaggagtgggagatctgaagagttctttgacatgagacatggacatacagagtttggagtttgccctgccagttttaggtcttggtttggtccagactatctcttcactgtgctcccttttggaatggtaatatatattttgtgtcattgtatgttggaagttggttatttgcttttttattttgattatacagggggttacaattagagaatgtcatgagtctcaagagaaactgaacttttaaatagtgctgatactatgatagactatggagacatctgaagttggactcaatgcatttttgcattgtgatatggctataaacctaagggggccaggaaatggaatgtggtagttttaataatggctcccatgggcttatatatttaaatgcttagtcatcagggggtagcactacttaaaaaggattaggaggtgtggccttgttggaggaagtgtgtcttgaggtttctttttcctttttttttttttaaattattttcacctctgaaattgtttcttctttgttttgctttttctctccttatttatttatttatttatttatttatttatttttagagttatttattacatatacagtgctctgcctgcatgccagaagagggcaccggatctcattacagatggctgtgaactaccatgtggttgctgggaactgtgctcaggacctctaaaatatcaggcagtgctcttaacctctgaggtttcaaaggtccaagccaaacccaatggttccctctttctaatgccttcagatccagatgtggaactctcagctacttctccagcaccatgtttgcctgtgcacagccatgctccctgtcgtgatgatgatagactaaaccactgaaactatgagcaagcccctaattaactgctttcttttataagagttgcaggggtcatggtgtctcttcacagctaaagaacaggcagaccctgtctcaaaaagtcaaaataaataaaatgctaaatatggtacttgccataatttctcagcactggtgatttaacagcacagccctgacattatcattatgtagtccctgaacacttctcatcctatcttgcttcttaccaccacccatcctacccttcttcttgtactttaaaaagcaaagttgtgtctggtatggtgacgcaggcctataatccaaataccctgtaagtaggagaatcaaaagctccaagccagcctgaactatttgaggctagcctgaactacacaatgaattataagatacaggctggtatacatactaagaccctgtctcaataatcattttcagaaagaaagaatgaaaacagatacctgttttatctcacaacagtatctaaaatgtttagaaaggcacttgccataaatatagcaggctcattcttgcataagtatacagtacagtactgtaataaaccaagctccctctgttccatgggaattcaatcaagcatatctctcctaatttctcccagtcctgggtcttcagcttggcaagcaaatgttcactttctttggaggatcagagagccaattctcatcctaactgactatcccactagcctgtttcctctgcaacaaagagggcctggcacccaacacaggaaatgcaacactcactctgttctacacccaaatgagtcattcccatcaacatcccacacagaaatactcaccatagcaaccactggtcctgaatgcatgtatttcactaggccagtaaagaagggacggtccttcaggtcaatgtagtgctctttgagaaggtcctctgaagcctgtcaaaggacagacagtgagaactggtcccaggcccataagaatcagcaggctaatttctcccccatccctcctgatgcttgaaacatgagctcacagcaagccggtccattataactagattcatcctctaccatcccagaggggagcagcaatagagctatacaaacaaaccctgtcttgaaacaacaacaacaaaaaagaacccactattaggaaggaaaagcaacaattcaatggctttttgttcccagaaaatacctcaactaaaatgttagatggaaacaaggagggtagtctatattagacgagcattaaactgaatctggccatctctcagagacacctgacatgtattcaaaggataaaggcccattgcagtgaccattccagaggtacctacctccaaactacctaaaagtacatgatgtacagcaataaattttgctaaagatagagatggctcagtggttaaaagcattggctgttcaagagggcccaggttcaattcccagcatccacatggcattttgcaaccatctgcaatcagttctgagggattcaatgccttctgacttccacaggcaccaggtacaaaagtggtgcacaaacatacatgcaggcaaaacacccatatacataaaaggttttaaattaaaataaaaaaaaaaaaagaattaaatcagcattcaggagtcagaagcaggaagatcaaggaattcaaagtcatcctcagttgcatagtgaatttgaggccagccttggaaacataagaccctatctcagcaaagagggttggatagaaggatgagtaggaacaaaagagaggagaaaagcaaagagaaagaagagaattagaacactcacttgcaaggctggtgtgtgggaacaaatcaaattagctacagagcaaactatcttcatgtgccctggctggtcacactctttgcatctacacagccttgcaagggcatagcagggcccttggttcttacacttccgaacaactacatcatacaaagcatattgccacatcagggggtacatgtaggccaggattatctgccaaaaggtacattcaaaataccctatccttcagcccactggttggtcatcacttgacaaagcaaaacttacaaagcagggatgcagtctgagcttgcctattctaatggagagctggtagaagtaccagctaccacatgcagacttggctttttttcccccatgatactcaatgcattggttccaataatctttagcctggaaaactgaccatatgctttttattgtggggtagggaaactaggttttcctttgtttctcaagtccatagcagatggaatatccctttagagtcatgtcaagtatctcttcttccattcttcaccaaaccgaaatcctcaacagaaatgtcagggttaagagagaaaaatgtacctagaggccagagagactcaagttacatgtcagccacttcactgtatgcattaccaggcacattatctgactttaagcctcagtttactcctagcaactatgagggcagaaataagtacctctcagagctgtcatgacagatggagaagaaaacttgtatacttagcatatactatggtgcttaacaaatgactggttcatttcattgtgtcttcagaacctgaacccacatccgctctcataattctatcatactcccccttagcattaacaatagtctactccttatactaaaaaattacataagaacaaaattgccgggcagtggtggttgacacctttgatcccagcatttgggaggcagagacaggcagatctctgtgaggctgaatccagcctggtctacagagtaagtgccaggactgccagccaggactacatagagaaaccctgtctttaaaataaacaaacaaacaaacagtggctggagagatggctcagtggttaaaagcacttgctgctcttgcagaggccctgagtttggttctcacacccatatcaggtggctcacaacaatttataactccagttccaggggttctgataccatctcctggcctccacatgcacctgtacatatatggtgcgcattacacacaaacaggcacacgtacatactcataaatacaaattaaaaaaaaaaaaacaagagtgcatctgagcacagtagtacacacctttaatcccaacactctggaggcagaggcagcactctgtgagttagtggctagcctggtctacaaagaaggttccaggctagccagggctattcagctaactcaaaaacagcagcaaaataataatgaaataaaaactcaacattgaaaattaaattgaactcaaaatacactatgaaccaaaagtgtattgctagaatgggaaaaaaatatggtgccccctaatgtatttgctttgagaactagaattcacatctcatagatctgcttgaagaagagttcttggccaatgaattcttggtatttattggaatattgttatctgagtggatgatgacttatgcacagaaccccaggactcagaatactgagaaaggaagatcaccaagagtattagaattgtttcctttctctgttctgtgaggagcccccacaagcaaaattgcagctttccctacaaagccccacgtatcatgcctgactcatgctaggcactatcaggtagtaattagtaaagcaaagattttcttcctgacagcctatcttgaaggccgtgggggtggaaggatagtctctaaaattatctgttcaggaggctagagaccaagagctccaaaacactcacagagctgagtcagaaattacagatctgcagtaatacgtggaattctacaatgttaggggtaaagacagactagttttgaaagccccaaatgacttggtttgttccaagattcagccaacatgcttggtcactgagaagacaccctaccatggggaagtctagacaggaaacaaagcaaacacagaagttactctgcaatattctactatattccaaataccaaaacaggaaatgtgaggtccactcacctgcataaatttcaggccaacaagtcggaatcccttctgttcaaaacgcttgatgatctcgcccaccagaccccgctggaccccatcaggcttgatagcaatgaaggtgcgctcactgttggccatggtcctggagagataagcagggaatgaaacaggacagaatctctaccctccctcatcatgatccttctcaagcggattactctctcataaaactggatttaatatattatgtctactttaagtctctctagtaaaatcccaatccctgcccagttcactcatcaatgaattttgatctgaaagtagaaaagggttcaaaagaagaaatgtaatttctaatctacttgatttcatacactcctattgagcttctgttatgtacttaatactgtgatagaactaaaaagggagacataaaactaagacacactaaaaagataccaattttttttttcttgtggtaataccagtaaggggaaaatgcaatgatatggttttcctactgaaagttacatctgattcaacacagtatgaccaacagcattagaacccacaagagttttagagactatgtcataacaaccacctttgggggctggagagatggctcagaggttaagagcactgactgttcttccagaggtcctgagttcaattcccagcaaccacatggtggctcacaaccacccgttatgagatctggtttcctcttctggtgtgcagatatacatggaagcagaatgttgtatacataataaataaaaaataaaaaaaaaaaaccaacaatcttcattctacaaagaataagatttcccagccctatacagtttgggatactccctaagatgtaatgactgaggatgtgtgccaataatcctaccactaggaaggctaaggccaaagggcagaggattccaggctggcctgggcaacctaaaaccctgactcaaaaaagaaaaaaggggaatgaaaagaaaatagagctgagcgtagtggggaggtgtggtagcccatgtcaatgatcccaacctgaactgagctacataagactctgtttcaagaaacaagagaaaagagagaaaagatgcaatgactatgctccatcacagaaggggagggactcataggcccaaggccttacccctgcctaggaagctaacggtgattaacggctgtgggtgagtgggtatcattttcttcagggatacagccatgggtaagctgctccagcaattaactcctccatcaatgaagcacgcaattctaattaaactcagtctcccccccaacacacacacacacacacacacacaaagacatgaaggtaggaggggactcacaggaaaggagttcaacaggaacaggagagccaaagattgtaatggaggagggggatgactaactattacatacatgtataaaactgtcagagaataaaaggacaagaaaattgaaggtccattagtaagaatagcaattaacatttattaaactgtgtactgggggaaagtgcaatgagtagtcaatgaacagtggcttatgggagacccacagcacaattcatcatcactgagggaagacacctggagagcatccattccagaaccttccatttccagggaacacaatcccacaaaatgaaagaagactccaccttgaaagacaatacctaagaggatagaaacaccagctcctggacctggctgcctaaacatgaattaacctctgattttatacattaagaatggggcctgcgacgggcggtggtggcgaatgcctttaatcccaggtttcgggaggcagaggcaggcagatctgtgagttagagaccagcctggtctacaagagctagttccaggacagcctccaaagccacagagaaaccctgtctctaaaagccaaaagtaaaaataaataaaataaaataaagaatggggcctgacccagctagatggttcagtgagcaaaggtttttgtaccacaaacctgagtttggtccctcgggcccattccacgaagttgtcttctggtgtgttcacaagtgtgctaaggcatgcatgcacaggaacatacaataatacataatcttttaatgatcatttctgttggtgccttcctcccctctcccgcctctcggatctgtgacctgcataaaagagttgatctactccagcccctgctttgattccaagccacagggcctggcagtcaataggagcaaagaagatgctttaaaaggccaatcatgccttccgaagacagacagaacccgcagacaagctggagaatctctgaaggaatgtggaacaagaatagatccctcagaaacagcccctatgaaaggctctgcacaccgaacacagacacacagacacagacacacacacacagacacacagacacacacacgcacacacacacgtgtcatttattcagcaagctctgcgctcagcacagggctggaaggagggtaaggcacagccgtgccggcgcagtctgacaggaactgcggccacagacaaaggcgagcccacgtgtcaggctgacaggtctgcacctgtccacagtcgaggccgcgatcttcctcaacgcctctcagagaatgcacccctttcccttcatttcacacccacctccctctccgcttacctaggccctcaacgttccctttccctcagcacccgaacccctctcaccccttcagaagccagtctctctctccggctgcaccggaaacacgtcctggcctcacgtggtttcgagcagcggctcgcacggaacctttcggaacagttctgattcaggagagcccttttggtggaacaccgccagtccccgcttcctccggtgagtaggagggcactctttccagggtttaacttccggcactgggtgtggtttttgtttttgtcgtgtgtatccccccgccccctccccggcttttccggctggcggccatcttttgttcctgcccctactgtcgtgtaactcacttcctccgttcccgagacgatttggttgcccgggaggtggcgctcacactgcacggaatagaactaaagccccagtcactccgcttctcttcgccctgtcaagcagcaaatgtactaaatactatgtgcccagcaggcactgttctagaacccagggataaagcagtaaactcacttgaggtttctgggagggttgaaaattgggacaaacaatgaaaagaaattgatagtgaacgcacggagttatgtaagtgctgtgaagaaagatcagagcagggaagaaaaataaggttgagaaatcgctgcagaagtgaaaatcaaatagacctacatgaagtttagtgataaaggagcaagcctattattagagagcggagaattatagtagccttggatggtaggaaactcagtagaagaatttttttattgttgtaagaggattttttggtttcctgagacagagtttctctgtagctttggaggctatcctggcactcactctgtagaccaggctggcctcgaactcacagagatcctcctgcctctacctcccgagtgctgggattaaaccaccaacgccccacaaagctttctcctcctatacgtcttttgttttctttttcgagacagggtctctctgtatttgctttggaggttgtcctggaacttgctctgtagaccaggctggcctcaaactcacagagatgtaagaggatttttttttaattattattgttttgttttgttttttcgaggcaaggtctcactatgtagacccagctgatctctaactcttagagatccacctgtctatgtcccctgtgtactaggattaaaggcgtctcatctggtattatttgtgattgtttatgtgttcatgtgtatgtctatgtttgaggtggtcaaccccccccataagctcatagcactattaggagatatggctttgttggagtgattagagaaagggtgtcactatggaggtgggctttgaggtttcctatgctcaggataccccccactacctgtcaacttcctgttgccttcagatcaaggtgtagccagcaccaagtctgcctgtacactaccatgttccctgccttgaagataatggactgaatctctgaactataagacaccaccttaattaaatcttttcctttttaagagttaaagtggtcatggtgtcccttcacagcaatagagacccaaacaaagatagagaggtgtcagatccccaggagcaagagttacaaacagttgtgagtaatctgatgtgggtgctggggatcgaactctggttctctgcaataacagtaggtgctctataaccataaggaatcttgtcaccatgcctagcctagtccagcaagctttggtttagctttgttcggttggttagttagatagttaattgctggttttgtttatttgtggtttgtttggaaatagagcctcttgtagctcagactgacctcaaatttattttgtagctagcctatttctgtatgttgactgtgatggcaattgtacacatataacaaagtttcaagaaatcataaatgagcacagggaaaactgttgagggcagaatttttgtgggtaacaagaatgacagttttctggatttgtttatgttttgctttggtttggtttgggtttttgttttccttgttgtttggaggcagttgctctatatagtatttaatgcactatgtagcccaggatagcccacaacttacagaagtactaccttagctccccaaattctgggattataagcatgagacaccatgtccagcttaagtccttggtttaagtttaagttttgttattgtttgttgtttgagacagtttctcttatagccctggttggcctcaaagttactagatagccaaaatgaccttgaacctcaatctcacatcttcccaaatgcagggattgcaggtgtctgccacacatcctgctaatgtggtgctagggacagggcatcctggactatataaaatggagaaagtgagctgagcacaagaaagcatgccttcaccgggtgttggtggcatatgcctttaatcccagcacttgggaggcagaggcaagcagatctctgtgagttcgaggccagcctggtctccagagcaagtgctaggataggctccaaagccacacagaaaccctgtctcgaaaaccaaaaaaaaaaaaaaaaaaaaaaaaaaccacacaacagcagcaacaaaacaagcacagtcctttcatcccagctattggtaggctgaaacaaaagggtcacaagttcaaggcatgccagtgctaccaagtgactttaagccaatccagtcaattctgttgagacactatttcaaaatataaaggacaaagacagatagggacggaaacttagtagtagagcacttgtgtagcctgaccaagtctctaggttcagacaccagtacaacaaaatactcttaatttttctttttcttttcctttctttcttttttttttttgttttttgttttttttgttttgttttgttttgttttcaggacagcgtttctctgtgtaacagccctggttgtgctggaactcactctgtagaccaggttgaccttgaactcagaaatccacctgcctctgcctcctgaatgctgggattaaaggtgagcaacactgtcgccactaccagcagcagaagcagccagctactctaattttcctttacaaacaaggtttcgtcttgaaaactttttctgtggtgtatgtaaatcaacatcctggccaaatctaagcagaggtcttagaggagaacggcccagactgctcaaccgattctgagtctcatcgccctttgccagtggcagaataaggaaagttagttgaaataaggtagtaatccaagggacaaaaatggtttgtaaacagtactgacagaagagctggatacaagtagtttcagaatatgtatttacaccaagcccatgtctttgtgatagttaagatgtagaacacgggccaggaaatgatgatacatgactttattcccaaaaccggggaggcagaggaagacaattttccgagttcaaggtgagccgtgtctacaaagttaatttcaggactgccagagctacacagaaaaaccctgtcttgaaaaaaccaaagcaaacaagatgtagaacatgagcaaaagaaggaaccaatgaggacttcctggattttttggttttggttgtttgtttgtttttttccatttccattttttataaaggggatttgcaggattgtagttggttgttttgttgttgtttgtttgtttaatctttgggtgcccaccaaccaactcccaaataaatacacagagatatattcttacttatgaatgaccaagccttaacttgtcttgtttctagccagctttttaaacttaaattgtcttgattctctttaactttgttttgcctctgggcttttaaagtttctttattctctatatatttctttcctttttactacatgcctagcccctggcattctcctctcctccttttcttgctccttggtcctcttcctcctctccccagcctagattcattctgtctgcctggcagccctgtctttccctctcctgcctagctgtcgattgttccgctctttattagaccaatgcggtgttttaggcaggcaaagtaacacagtttacagagttaagcataaaagaatgcaacacagggctggagagatggcacagaggttatgagcactggctgctcttccagaggtcctgagttcaattcccagcaaccacatggtggctcacaaccacccgttatgagatctggtgccctcttctggtgtgcagatatacatggaagcagaatgttgtatacataataaataaataaatcttttttttaaaaaaaagaatggaacacatctttgtaacattaaacaaatattccacagcataaacgaatgtaacacatcttaaactagtattccataacacatgtataatcccagtaccttaagcaggacaaccaagagttcaaggtcatcctcactatcctaaaatagtgagttcaaggccagtctgggatccataagacactgtctcaaaaaaataaaacaaaacaaaaaaacaaaataaaaccacctttttattgattggaatggacttgtgcttttccaattcttttgtaaaaaaagatcaactggacatttgctaaaactcaggtcccattctgttgggtttatttagttatgtattggggttgtttgatacagggtttctctgtggctttggaggctgtcctggaactagctcttgtagaccaggtggtctcgaactcacgagatccacctgcctctgcctccctagtgctgggattaaaggcatgccccaccacacccagctggttagtagacactttaaggcagcttcagacctgggttctcattttgtttacttgcgggtgatggaacaatgaaatggctgttactttatattttgggtttctttcttcttcttcttttttttttttaagatttatttatttgagaatcagcttccggttccgttgggctcgctcctcttctaagctatgtgtctcaagcttctcaagcggacatcccgcaactgtcaaccatggaccaggtaatgcagtttgttgagcccagtcggcagtttgtcaaggactcaattcggctggtaaaaagatgcaccaaacccgatagaaaagaattccagaagattgccatgaccacagccataggatttgctatcatgggattcattggcttctttgtgaaactcatccatatccctattaataacattattgtgggtggctgagttctttatctttgtgggaactagtgaacaaatgagggtgtgagaagctcatgaagtaaaaagttgcctgcatactttgtggttttttttcctttcctcctccctaagagttttctattctaaattaaaataatttcaaaataaacatttttttccatgaaaaaaaaaaagatttatttatttaatatacagtattctgcttgcaggccagaagagggcaccagatctcataagggatggttgtgagcctccatgtgggtgctgggaattgatctcaaggcctctggaagagcagtcagtgctcttaaactctaagccatctctccaacaccaggttgggttttttgttgttgttgttttgttttgttttgttttttcaagacagggtttctctgtagctttcgagcctgtcctggaactcactctgtagaccaggctggcctcaaactcacagagatccacttacctctgcctcctgagtgctgggattaaaggtgtgttcccccacagttcggcttttatttaaaaaaaaaaaaaaaaaaaaaaaaaaaaaaaaactttaaatacatttggagtggaggtgttagacccccgaaaactcaagtatccggggtctcaggccaggttcgcggtcaccccaatcaccaggcggattcgagagcttgctgcaaactgcacgaggctttattgtaatttaacgaactaaccccatgttagctcgggtctttcacccacccgccatggcagacagctagaaaaagacggctccttgggtctcccaaaagatcttatagggcagcgtaaggggagtgtctaggggtacgcacaggcttatgattggtgtgcctccaggcttggagggcttgccctgtgttgattggtcaactggttgttatggctcataggccctcccagggtggttgctatgctctctacgtcattgctgtgcgcttgtccgtaaagcacacccagagccataaagcatagcgtcaccagctaacttctgattggttccttgtcacgagacaggcacctgactttctagtgactaacttctgatgggttccttgtcacgagacaggcatctgacctctacgtgaccaaggcaggtttatggcaagcatgtgttcggctgtaatggctgccaaaaggaagctggttccttcagagggacatgtgccttgacaaatatatcgagaccagagggcaatatgaaggaaccccctgtgacctttccaccttgtgggttctagggtcaaactggggtcataaggcttggcgacaagagcctttacctactgagatatctcactgacttgttttgttttcagccaggttcttttgaagtgagaatttaagtaagctttgctaggagttgggaggcagacgttaaggaaagggacataagaacaggaagttctcctgtcttcctggtagcatgctaattatatgactctcccctccccttccttcctagccctgcacaacccccaatggcttctccaggtaaatgttctatgacccaagtcagaaagtgctaagaatttaaaactaaaagaaaggtttttggctgtagtattagtgagggttctctaaagtgatagaattaacatatatagaacatatatagaatgtactcggatgatttattagagtggctagtacaacaatggctgtctcctgacagaaaggccaggaatttggtagttgttcagtccaagaggctggatgtcttagctggtcttcagtctctattggaatctgaagaagtagattctcaaaccagtgaaggaatgcctcagtagcaggataaatgaactagccagtgagagctggcaggcaaaaagcaaaaacttccttcttccgtgtccttgcgcatgggctgccaccagaaggtgctggtatcatcaattatcacggtatgacacgttatatttaagtgggtcttccaaatgatctaatcaagacaatccctcaaaggcatgcccagatgctttgctttgagttgattctggatgtagtcaagctgacaacaaagattcccatcacgagcatgttaacctatgccctgtccaaaccctagcagggatttcagactatcctgaaacatccagcttagagttcactgtctcctctggcagcactcactgcccttcagcctttcctacataatttcttgttgttggtgtgtgtgcgtgtgcttttatgttactcagaatcaaacccagggccttatgaatgctaggtaagcgctctctactgagctatgtcctcagcatatatatacatacatatacatatacatatacatatacatatacatatatatgtatatgtatatatacatatatatacatcaagcttgatatatatatatcaagcttcctttttccctgttctttatataggctgccaacagaaagtgtggccaagattaaatgcagatcttcccacttcaaacagttaagaaaaaacccctcacaggtacaggtgtatccagctacttgggcttcagttaaatctagatgtagttgaactgacaacaaagaaaagccaacacatttgtagcacgaattctctttggtcataataataaaaactcagagtcagctattggaggtgaaagataaaagatcagagaagcaaagtggccagccactagagagttcttacctctgccaatgctcagaccaaaggatcaatcctctcctcagactgcctcctcagactgaactcctgtctcctcctgccatatattcctctctctgcccagccatatgtcttcctgtctccacctccttaatgtcactccaagtgctgggatcacctttgtgtgagctctgtttctcttttagactggatcaatttcatgtagcccagggtggccttgaactaacagagatccatctgcctctgtctccctagtgctgggattaaaggtgtgtgccaacactgcctggcctctaaggctaactagtgtggctagttttgcactctgatctttaggcaaactttatttgttagatcataaacaaaatatcaccacacagactaaccaaaaatttttgtttgtttattttttcaagacagggtttctctgtgtagccctgactatcctggaattcatttagtagatgggggaggggacttgggtggaatttccaccataatatcccagactctttgggtatatggatgccaggggctggtgtaaaacttccaccttaacagcctccatatggtagaaggaaagagctaactccaaagagttgccctctgaccgctacataggtgccttcagctccccaataaagaaccataaaaaataaaataaaatagaaatagaaaaagagtagccaagcatagtagcttatgcatgtgatcacagcaacttgggagatatcctggtagggtatcaggagttcaaggctatcttccattatgaagcaagttctagacctacctagggtacaagagacactgtttgccaaaataaaaaaattcaaaagctcaaatgaaacaacacaaaaaatgagccattgagggctattgtttttgttcgcttgttttttactcattaacagagaaaagaacaaaagacatggccccattaattcatgctcacagtggtacacaggaagagctgtgatttagattttaaccaacatctggacggtggattggacagaaaggatgggagaaatgtctgataggagactataggcatcatcaataaccaaagagtggcaggtcagtgaagggaccagctccccgttttggcagccatgacaggctaacacgtgcttgcctgaccttgctgggcctgcactggtcactaggaagtcagatgccctccttgtggcaaggaaccaatcagaagttagctagggggctgtgctttacggctctgggtgtgctttatgtacaagtgcactacagtgacatgcagagcatagcaaccgccctgggagggcctatgggccataacaaccagttgaccaaccaacacagggcagttcatccaagcctgaaagcacaccaatcctgagactgtttcatagccatggacactccccttacgctgccctataagatccctgtctcgtggtttctcagggtctttctctaaccattatctgcagtgggtggatgaaaggcccgagctaatggggttagctcgttaaacaactgcaataaaagattccatttgttcccgaatgaatggggtccttgctgcagctcgtatccctgagtcaataaagaaacctttatccttgcattcggtgagtcgtctccttggcggtgggttcttttggggttccgaaatctgggcacaatatcagatcttgtgcgttaatacagtcaaggaacatgtttttgatggattcctgggatacactgacaaggtttgcacctaattagaacagcaagtcttagatgggcaattaagacaataacagtgcttaagagcatggctgtgtttctaaaacatgcggatgtggcttatggctctgttacttttttagaaacttttcttttttctttttttttctttctttctttttttttttttttttttttttttttttttttttttttttttttttttttttttttttttttttttttttttttttttttttttttttttttttttttttttttttttttggtttttcaagatagggtttctctgtattgctttgcagcctgtcctggcactcactctgtagaacaggctggcctcaaactcacagagatccacctgactctgcctctcgagtgctgggattaaaggcatgtgccaccaatgcccagctgttattcaatatttttaaaaattaatttctatagttgctaaatgaagatgatagtcgcatcataagattgttgtgagaattatataaagcaatccaatgaaaatttagcagactatctgatacactatactaaatgtcagccttggaaactgacaatgtgacagtaatggagagaggaaagcagagtgggccagctagaggaccatggtttgttgtaatgttaccagtggaggactgaaatagaaagtgttcagcaacggggctggagaaatagctcagtgggctagagcatttgctgcccaagcataaggaactgagttcaaatccccaaacacacattaaaaacaacaatagaaactaggcatggttgagcacatgtctgtagtactaaagctgtggaaggcagagacagaagagtcaataaggcttgtcggccacctacctagctccaggttcagtgagaaaatgtctcaggttataaagcagagaggtatacatcaggacactcagttttctgctccgcccactacaggtgtgtgtgcgcacatgtatgcacagtttttagcaattaaagggagtttaggagagatgccaggcttgaggacaaatattttggaattgtctacctaaggtggtctataggaccttaaaagtattttaaaagggatgataaccaggtattccagcactcaagaagcagaaggaggccaagcagtatacccttaatctcagcctctatgaggccagcctggtaccatagtgagctccaggacatccagggctacagagagaaaccctatctcagaaagcaaaaaacagaagaggagaaagaggaagcagaaggaagattgctatgcggtcaaggttgtcaggttccaaagaaacccaggacaaggctcactcaatcctgtagctcctcccagcgcttctcaccctatcccctaccctaaacctctccagcccaggggaggctatctgatagaatgctatctgcttcccttcccccaccttctgctctctttataagtcagccattttggccacctgctctattggctcgtggctctgtccacccttggatctcttaacttttgatctgtttgcctcctcctctcttcctcttttaatctctctctctctctcctctcatggcctgatctattctgctagccatggtcagtctggatccttccagatgcttttggctgaactcctcctcatatctacaataaaatccttcttctcaaccctaagacccctggaagctcaggcctccaggatctcagcccaggacctccgtcaccccaatcaccatgcagaggcggaaacttgatgcaaacagcatgaggctttatgatagttgtttaacgagctaacccaccatggcggatggctaggaaagacagctcgaaccatctgcatagagaccttatagggcagtgtaaggggagtgtctaggggtacgcacaggctcaggattggtgtggctccaggcttggagggtttggcctgtgttgattggtcaactggttgttacggcccataggccctcccagggtggttgctatgttctgcacgtcattgctgtgcacttgttcgtaaagcacacccagagctgtaaagcgtagcacaaccagttaacttctgattggttccttgccacaaggcaggcatctgacttcctagtgactaagacaaggtcagacaaatacatgttcggctgttatggctgtcgaaacggggagctgatctcttcacaaccataccttagaatggtggtgtcctcatttttcattcataggtcaggctgggcaatgaatcaggattagtatactaattgccattcatttgattttgggttttgttgtgagggaagtgttatttctgtattttgaggcaggatcttgctttgtatgatagcccaagctaagctcaaactcaaggtgatcctcctgcttcagccttcatagtgttggaattactggcttgggctaccatacctggcatagtctgcatttattaaagttgtactatgccaaacacaaagtgttttgatttttagtttgtttttgagacaaagtctcataacccaagcttgctttgagctcttaactgagctgctgaggctatccttgaagccctgatcttccctatctcctagatgctggggttacctgcatgctccatgatgcctatagagttcacttgtactaactaatcccacacccacatgacctcctttttttgttttgttttgtttttgagacatgttttctctagctttggaggctgtcctggaactcgcttggtagatcagcctggcctcgaactcagagagatccacctgcctctgcctctgcctctgaagtgctgggattaaaagcatgtgccaccacaacctggcccacatgaccttattgagctgaggtgtagctcattagcagtacactctatgagcatgtgggatgccttgggtcccatcaccagtgctgcaaaaacaggaacaataacaacaaaaattgatattctttcttttcaggcaaggaaacctaaagcctcatgtggctcatgaggggaggattactgggtcacatgcagataccttggaaggagtaggaccagagtttcaagccaatctccatacagccagttcctggcccttaaccacatgtgtattacttcataattacacaaggcttcattcctgggtctcacttctggaggaggtcactacagtgtgcaaataaatcataatgggatgacaagaagatgacataattgtttttaaatggaatttgaggcaaacgagacagctagctgtaatactgtactgagaatggaattgatctagggcacagaagtctggttgttaatgatttaaagaatcagagtaactaatacattatgcctgtgcatgtgaaacagaaaggtattctgggaggcagggcaaagacatttataatactaattgagaatgagcccctggggaactttcactgccaataatcaaggatgaagtatgaacccgcctacctttgactccaggggcaaactactaatcaaacagcaggatcttctcctgaaggtgattgcctgagcttcctctgcttttgcttcctcagcactccctaccccatccccagtctttcctgaaagagagaggcagatggcttttggggaatttagaaagatgtgaaagactgggactgtttatcatacagcctactgcaacaatcataggaagtagggactccctttcttatttatttatttatttatttatttatttgtttgtttgtttgtttttcaagatgctatttctctgtgtagctctactgttttggaactcactctgcagaccaggttggcctggagctcagagatctgcctgcttctgcctcccaaacgctgggattaaaggcatgtgccaccactgcccatcttgtgggcactactctcaatcctgtcttacagacagagaaactaagaaatatgaaggtttaataactgccttgacctcaagggactggttgtgagttcatttctctctttctccagaaagtaagttcatgcgtacatgggtgcatgtatgggtgtgagagagacattagacgtgggtgattgaggcaggttcttaagtattcctggctggccttgaattcattatgtagctcaggctggtcttgaactttgatcctcctgcctcagtttccccagtactgggattacaggtatgcatcaatacacaagtttatttccactttcttgcttttctttttctttctttctttctttctttctttctttctttctttcttccttttttcaagacagggtttctctgtattagtttgtagactgtcctggaactgattctgttgaccaggctggcctctaactcacagacatccacctgcttctgactcctgaatcctgggactaaaggcatccagcaccaacgccaggcttatttctactttctaagcttagattcaataaaacctttagcaaaaccatgaacttttggtttgtaatagtatctatacttgccctggatttcaggctaattctctctggggaaaaggattctaaggctcaacactcagggcagtgacttggtattaatttccttcttgctttcatgtggtttaagtctcttggacgcctgctggagtctctgaaaagttttgtcttccccaagggaaattctagactggtttagctcttcttcctcttagcttctgtagtttagagtctccatagcatataacctattatttctagaaaaccacatccctatagtacctcttgtatttgttatattaggcgaggttatatagcaacaaaaaaaaaaaaaaagaaatcccaagtgtccatgactaagccaaactgtctcaccatctcaagttgacttcagggccagcacctttctccctgggagcctgactattccaatatgtggctatgctatcttaagataaaacctaagcacactattgcagggtggagagaacaagtcacatggtagttctgtttgatttgtccttgaggtgacagtcatcaaaaggcatgaaagcaggttgtattacccctccaggtgtcaggtcctgtagccattcctagagttagataaatactctgggaaattgacctcatgacctcttgtagaaatgggtaaagcttactgtcttagttaggtttccattactgtgaagagataccatgaccacagcaactcttataaatgaaaacatttaattggggtggctcaattacagttcagaggttcagtctattatcatcatggtggcacatggtgttcaggcagacatggtgctggagaagtagctgagaatcctacatcttgcaggcaacaggaagtgtctgagacaccgggcagtatcttgagcatatatgagacctcaaagcccacttccacagtgacacacttccttcaacaaggccatacctactccaaagaggtcacacctcctagtagtgccactgcctttgggggtcatttctttcaaatcaccacactcatgtgcattctgatctgaaggaactgtaatatgtcttttattgttttgcattactggaaaaacctggggcctgtacatgctaggtgagcactctaccactggctatatccttagcccctggtgttttgtttttgtttattttgttttgctttgttgagatagggtctcatgtagcccaggttgtcctcaaattcaatgtgtatctgaagctggtctcctgatccacctgcctccattttctaggcataggattatagacacataaaaccagggctggtctttattactttttgtttgtttgtttttgggttatttgtttttgtagttttgattattgtgataggatctttctatatagctttgctatgtggcctaggctagaattttaagcaagtacccctcccacacatacacacaaacacacacacacacacacacacacacacacacacacacacacactcaatatctacctcaggctagcctggaacttgctatgtagaataggctagcctgtagtcagactttctttgaaccaccagctcccaaataatgatgtggagacttcttattaattaagaaagcttggccttagcttagacttgttcccaactagctcttatatcttaaattaactgtttatatcaatttacattctgccacgtggctcattacctctcctcagtactctatgtccaacttcctctgtgtctagctgatgaaatcccagagcctgattctaacccagagttcctatctctgcccagaagtcccacctattttcttcctgtctagctatattggctgttcagttctctattaaaccaaccagaaggtgcctaggcaggtgaggtaacacagtaacacatcttcagtgtgatcttttgcctctacttccaaagcactaggattataagcatgtataaccatggctacttttagattagttattatatatatatatatatatatatatatatatatatatatttagtaaaacaagatttccttctgagcatgtgtgtgcctaagaagaggacacagaaagctgatagcaagaatttacttgtagatattgctcttttctttaataattgcctggggtccatcttagttagggttttctattgctgtgaaaagacaccatgaccatggcaactcttataaagaaaacatttaattgagggggctcacagtttcagaggttcagtccattatcatcatgatgaggagcatggcgggcatacaggcagatgtggtgatggagctgagagtgctacattttgaaggcaacaggaagtagactgactgtcacactgagggaagcttgagcaaaagagaactcaaagtccacccccacagtgacacacttcttccaacagagccacccctcctaatagtgccactcccttatggggaccattgtagttggacttttctttcctgcctgctggttcccaaataaccaacatggagacttaatattaattatagatgtttggctgatagctcaggcttgtcatgtcattagctgacattaacattttaaattaactcatatttctttatttctaaaagatttgtttgtttattatatatacagtgttcagtctacatgtatacttacatgccagaagagggcatcagatcccatggctgtgagccaccatgtggttgttgggagttaaacttaggtcctctgcaagaatagccagtggtcttaaactctaaaccatctctccagcccctaacccatatttcttatttcccctctgccaccaggtgatagcttcttttaacacagtatgttcatctagcttctctctgcatctctggagactcctgagactcctctcttcttcttcccatcatcctcttagtctggctctcctccccaatctctttctgcccagctaccagccaattagctttttttattaacaacaaaagcaacacattttcacaatatacagaaggattattccacagcaggccattttcttccaaacaaccatagggtcaatatattaaaggttaggtatacaaagagaagtggtagggagatgcatgggtcagtgtgaaatgctgcataagagatttggggtctctaatggtaggaaatagtcactgggaataaagggcccatggaaatagaatattaaagttaggaaagtaggccaggtgacacgccttcctggcacttgaaaggaagaggcaggctgatctctgagttccaggccagcctggtctacaaaatgagttcccagacagtcagagctacacagagaaaccctgtctcaaaaaaaaaaacagacataaataaataaaatatataaattaaataaaattagggaaagtagcaaaagggaaagtggttagcttgaagaacaaaatttaaaatccttagaattctagatttaggaaataagacttttgtggggggggcttttcaagatttttagtatatccaaatgaggagatccattttatttcagcttctccactgctaaatgagggggaagggtctgatttagtgtctctgcctccttcttgtctgtgaccaccagggaagaaataaatgtatctgttgtagtaagctttggacatcccatcaagcttgtttttattttctttcttaaaatttatttatttttatgtatatggatgttttgcttgctttgtatgacagcaccatgtacatgtagtgcccacagtggagggagcagggcattggatcctctaagactggagttacagatgtttgtgagccaccctgtgggtgctgggaattgaatgtaggtcctttggaagaacagtcagtgctattaaccactgagcaatcctcccagcccccatccttctttttcttgatcttgatagatttgacattatttggcctgtctgtgagcagaaagtccttcaatgttctcaggaacattaatagagtactcaaggcttgtggatgtcacctggtggaaactcaacactttttttttttttaagatttatttatttattatgtatacagtgtatgccagaagagggcaccagatctcattacagatggtgtgagccaccatgtggttgctgggaattgaactcaggacctctggaagaatagtcagtgctcttaacccctgagccgtctctccagccccgaaactcaagacttttgtgtgttttgagatgagtcttattttgttgtcttgaccggtctggtactcactatgtagcccaggctggccttgaattcatagagatctgcctgcttctgccttctgagtgctgggatcaaaagcgtgtgccaccatgcctagaacccaaagccttaaaaaaaaaaaaataggatctctttatgtagttctggctggcctgggactcactatatagaccatggtggtctgaagctctgggtgatcctcctgcctctgcctctcaaattcagggattataggcatgagctgcagcttcaatcactcacatgacaaaagtataatcctgtgccgccaaggcaagcttgttttttccttatacataaaaattcttgttgcattagaatggatgtctacagggataaatcctccttgttcagatccgtagtattatgttcaacaggatattgtttgcttttgacttagaaacttgaaagctgtgtgtgtgtgtgtgtgtctgtgtgtgtgtgtgtgtgtgtgtgtgtgtactcagtcatcaagcatgcctgataagcacttttttttttttgagtcaaagtctcaatatagtcttgacagtctggaacttgctatgtagagcaggctggccttaaactcagagagatcgatctgcctctgcctcccaattgctggaattaaatgcatctgccacagtgcctgccactatgtccgttgtggtgaacactttaccctatgagccacgtggcttggcttttgacttgggaacttgaagcagtagaagcagaatggggcactgagctgagagtcattggttcaggacactggtttctacatggccataagctacagctggcccctccattgtgaaatgatgggtttgtgtgccactcagcaggctaacagacctcctaaggctgacttgtctcacttagcaaggagtgaccatcctgctgggaaggagcttctggtcttctgggaggatggaagcagcagactctctgctgtcccttgttaaactggaaatgataaatgagtatttgttccctgcttctgatgtgcggggctggtggttggcaaatggatactacgcttaggttttcatttggccctgttgtccctactaaaaataagccactggtgtcagacaagctgagtcattttcatacatgactatgtggaggaaaagtgacaaaggtcaccaaggccctgtgtattatttcccttctgagcagacaccacccctgttccaaccagcccctctttttttctgttgttttctttttccttcagataagctgtataccttaaatagaaaatgttttcagcagcaaggtattgtgattcaggttgctcatatcctgtttctgcttatggattgaccttgtcttagatgccatttacttacttaactttactcttcagatggatagaagtggatactaacctttgtgactgcaatttacagtctgtagagtgatttcctattcagtcatccccctggtgatgtggcaacccgaggacaggttctagctagctcactagtgttctgtatccccacccccaacacccccaaacaggctctttactctgtagctctgagccaaggctgttctggaactcacggtgtagcataggctggcctctcacttagaataatcttccactttggcctctggagtgttgcagttacaggtgtgagcaactatgcctgccaaatgttaaattcttaacaagaatggatctgcaagctcatccctcatgatatctgcttagaggtatatagctcagtggcacttacctgccactgaggacatgtttgtcccaggcactgagttggctctgtagcactgccaacaacagcaacaagcctggggcactctgaaaaatactctgacaatcttcatgagcccgacattccataatcaaactgcctctccaaacatgctgtggttcgtatggagtgatgagtcacttggctttgcatatagccattccagcagacccgagtcctgggagctctctttctctttcagtgactttctcttctcccctaagtgggaacacaagtgtgtgaaacaagaaaaacaaaacaaaacaaaacaaaaaaaaaccggggtcagatagaaataactgtggcgctccataaggctggctatacaactggactgataattccaaccttcccctgattataactattatgcttaggaagaaactcctcccttccttccctcaactccctgccctgcccccaactacttgccatactgtcaccactaattttgcaagtgtaaggaatctcttggaatggaatttccttccctttaggaatcaaaagtaaacactccaaagtccactacgagctgtttttccttgataattcttggtctttgtgataatctcagtccttgggggttagactcaagatctgggaataagagacttattattgcctacataattaggaactgactaccaggctcctgttagtactactaaaagcagtcaagaattttacttatctctctctctctctctctctctctctctctctctctctctctctctctctctctgcctgtctgtctgtctgtctgtctgtctatctatctctgtgtgtgtgtgtgtgtgtttatgttgtgtatgatgtacattgactatgtgtgaccttagacatatttgtaccactgtaaacaagaagtcaagggacaagtttctaaagtcaatcatatactgtggttaccaagagtcaaactcaggtcattaggcttgtttggcaagaagttttttgtgccaagtgtcttaatagcccattttatttttattttaaattttttaaattttttgtttgttttgagacagggtctctgaaaggttcaggctttgatgctgatcggctctacttctttaagagacagaccctgccccctgacaacagccagggcacgcacaagaaaacgtactacgtcattacccccggaaaactcaggtatccggggtcccaggcaacgactgcggtcaccccaatcaacaggcttcaagagcttgatgaaaactgcatgaggctaaccccatgttagctcgggtctttcacccacccaccatggcggatggctagcaaaagacggctcctagggcctcccaagagatcttgtagtgtgtctaggggtacgcacaggctcactattggtgtgcctccaggcttggagggtttgccctgtgtcgattggtcaattgtttgttatggcccataggccctgccagggtggttgctatgctttgtgcgtcattgctgtgcgcttgtccataaagcacacccagggtcgtaaagcatagcaccaccagctagcttctgattggttccttgtcacgaggcaggcatctgactttctagtgtctaggacaaggtcatagaagcacgtgttcggctgttatggctgccaaaagggaagctggtcccttcaccacgtcacccgacacgcgtgaggactctgggcacgcgtggaacctcagtgcgcatgcacagtctttcctttaacagctccaactttcctgcttcactctctctctctgcttcctctctttatgcagttctctctctgctcactccttctctgctcttctctcctaccacctatgcgctctctctgcctctccatggcgaccagccatggcggtcagccattacccctgttcctcttctctcttagtctccctactctgccgggcaatataataaactagttaacatgtctcatcttgcagctttctcttttcctccttttgaataaaaacataacagtcttactatgtagtcctggcaggcatggcactaaatatgtagtctgtcaagtctcaaagaaactggggataagtctcagtacctgtggctcctcccagcacttttcacccctctccataccctagacctcttccactcaaggaatgaacttcattttctttccccagcttttctgatttctatataacccagccatttttggttttgcactcccttttggtctcctggcttgctcttggcctcttgaccaatggctcccttcttggtccacttgccccctccctcttctcttcttttgtcactctcagccctctcctcacattgcctggttcaatctggacccttctagatgtgtgaaacaattaataaaaacccagagacagatactggggttcaagctggagatcagaggaacaaagcagccaaccactagctcttacctctacctcaggctgaaagggctatcctgttccagtttggtggagaataattctctgagactgactctgcttgttccttatatacctttccttgcctggccatatcactcctatctccacctccctagttctgggactaaaggtgtgtgatcccaagtgttgagatcacctttgagtgagcagattctcttttagactggatcaatttcgtgaagctcagtgtggtctttaacagagatccatctccttgcctcctaaatcctgggattaaagctgtgtaccaccactgcctggcctgtatggcttgtggctagctttgcattttgatcctcagtggctttattaatcataaacaatataccaccacatagatgtctctgttttctccctcatatctacaataaaaaccttctcctcaaccatatgtaggagcaatcaagtcttcatttttcattcatcgtccagtctggccttgaattcacagagattccccctggctctgcctcttgagcactgaaacataggtgtgtactacaacaactagcttgtttatcaatttacctatttatagagaaagtgaaagggtgaagtctattgtttacagatgttaagtggacgcaggtaacgcaacaccctgttacagtccaatggttcctcatctaccccagcctgcatagttcacatccagaaggtatcaacaaatggtgatggatatctttcaggtctggtgttctgtcatggcaatgaaaaaaggttctgtcaccttgaccagctccaccatcgcagggacaaaaattacagtctggagtacttggcatccaagcacacttattttcatcatgtatggagtagtggggagggggtgtcttgatgttctcctgatcctcctcctcagcattttccaaatcatctagtctttcatcttcccatagtaaaagttacatcatcaaatattgttcttctctgacataaacacagaccaattaaaaccactccattcattcattcattcattcattcattcattcaatttttggttcagcctcatgtagcctaagctggcctggcactcactatgtagctgaggctagccttgaacttcttttttttaaaaaataattttatttatttattttatgttcattggtattttgcttccatgtacgtctgtgtgagggtgtcagaagcgctggaactaaagttacaggcaggtgtgagctgccatgtgggtgctgggaattgagctctggtcttctagaagagcagacagtgctctcaaccaccacaccatctctccagccccagccttgaacttctgatcctcctgcttccaattctcaagggctgagaatgctcatctgtaccactgcacctggccaaaaccatattttttttcaagatagggcttctctgtataagacctttggttgtcctagaacttgcttgtagatcaggctggccttgagctcacagagatatgcgtgtctttgctgagattaaaggtgtgcatcactgccgcccagccataattttaactttaaaattatacttattgtgtgtgtgagtgggaaagtgccacagtgtgtgtgcagaggtgaaaagacaacttgtgagagtagcctctctgcttccatgtgggtgctgggaatcgaatacacagcatcaagcttggcaacaatgtctttattcactgagctgtcctgtcttgctggccccagaatcagaatcagaatcagaatggaaggaaaacttcagtctctttctttctttctttctttctttctttctttctttctttctttctttctttctttctttctatctttctttcttcccctccctctctccctccctccctcctttctttctttcattctttctttctgtcttttcgagaagtctgaaaatgtagttatgaaggcctgaggatataaaggcttaaatggtgataaaatgagttgagacattaaaaagaataaaaaatgttcctgatttctctatttcccatgctactgttcatagtaaagttcaacaataccactatatgattataactacaaggtcaagattacgatgcttttcattgtcaaaaaaaaaatctgtctgtttttaaaatggtaatactttcagccaagttgcttctaacatgaatatgcttctaacatgtctaatacttatgtttccacaaactctaaggattcttgtaagttccagggagccgaatcagatccaaacaggtcaggttcactccaggtaatattcaacctttccccggtcccaaattcccttcactcatcttgggaccccttgggaacccctccctcatcttacaatcttcccctcaagtgacaggacctaagaaaaatttttttttctaaactcaaccttgtcttctgctctgtcaacatcttgccaggtctaagaggcgccagggagttccatacagcctggactacaatgaagcaaccagcttccccaggacgtggcagcaccccaaccttctcgggtcccccaaagatggtcaacgccccccacgtcagcaggaagcagtcttaagaattcgacgcccttattccttaacctgccatgtctaaacaccccaccttttttaaataataagtagaagtgggaatgaaaggttcaggcattatgctggcctgcccgttacctggtggaatccactcaggcaataccctggtcagcccaaggttccatgggaaagaagtctgcacgcaggtgcagaggacccctttaaaagataggcccctgcccctttacgctctctctctctctcactctcctctctctctccctctctctctctccctctctctccctctctccctctctccccccctgtctccccgtctctctctctctgtgtgtgctctcccgtctctgtttcccctctctgtctctctatggcgaccggccatggtggtcagccattaccctgttcctcttcttagtctccccattctaccgggccttataataaacttatagtcaatatgtctgtctcagcaattcctcttttcttctttttaaacaaaacaataacagggtttctctatattgttttggagcctgtcctggaattcgtccagtagaccaggctggcctcgaactcacagagatctgcctgcctctgcctcctaagtgctgggattcaagtgctgacacgtcctgtagcaggaaagaataaaagaataaaagacccagcgactgatattggggttcaagcttcaagctgaaggtcagaaaagcgaagcagccagccactaatttttacctcaacctcaagctggaagggctgatccacaagctctccttagagtggctggagactgaatgctgaagaccccgcttttgtcttttatacccctctagtgctgggattaaagacgagtaatctgttactcttttagactgattcaaacttgtgtatcgctggatggccttgaactcagagagatccatctacctcttaatcctgagtcctaggattaaaagtgtataccactacctcctagcttctggctacaggattaaaggtgtgtgtacctggcttctatggcttgtggttgactttgttttctgaatcctcaggcaagctttaacaaatcagaagtaatatatcacctgaacatccagctgaaaacttaagtctttaacaaatcccaatatttagggctggagtgatggctcagcagttaagagcactgactattcttccataggacatgggttcaattcccagcacccacatggcagctcacaactgtctataactccagggttacacagacatacatacacgcaggcaaaataccattgtacataaaataatattttaaaacccaatattctacaaatgaagagattaaggctcaatagtctttactgtggtgactaccccatctaagttgttcataatgacagtccatatgaaactaaaaggttctcaacttcaaaaccattttctttcaactctcttacaacaggttatgtggttccatttgtggatcgacctgtccctgaatccattgtattatttcatttattttactacaggcaattgaacctatggtatggtatatgctaagtaagcaacattgaactacctttccagttctctcctctacttatctatccatccatccattcatccacctacctatctcttgtgtgtgtttgtgtgttttgacacgaggctttactttgtaccccaagcctacctggtgctcactaaatactaaataacttaagttgacttctaattcacaattcttctgtctcagcttcccagtgctgatattacagatgtgagacaccacacttggcttcatttattagctttattgagatatagttcatataccatacaacctaagtacagcatggaatgccttttagtatatcaacagagttgtgcatcacttcaattttagaaaattcctattacccacaaaaattccacacccattattgatcatttccatttatctttatcacaccccatgcacccagaattagggaaccacttactgtgtctctagattccacaactaaggacatttcatatgagtgggaccatatatttcatttagtatatgtttttaagatccatccatgtggcagtatgtactttattattccattacacaattcgttatactttatcaatttattagttaatatttttggattatgtgtatgagtgttttgctgcatatatgtatatccattatgactgtgcctggtgcctgaagaggtcagaaggcactagatcccctggaactgattgtagggacggttgtgagccaccatatgggcactgagaactgaatctgggaccttggaagaatgaccagtgctcttaactgttgagcaatctctgtagcctccattcataagtttttacaaaaatatttgtgtgtgtgccgaatttatgtacaccacttctttgtaagtgcccacagaggccagaaggagtaaggtcctttggagctggagttacaggtggttgtgagctgctggaaacctaactgtagttctctgcaagtgcagtagctggaccatctctcccatcccttattttaattttaagatttattttaattacttaggggagggggcagatgtggacatcacagaagagcttttagtagttcattctctcctacaatgtgggtctggtgaacaaactcaggttgtcagtcttggtggcatggagcttactcaagacctattttactttttcaattatgtgtgtatgtgtttgtgggagtctgtgcatgtgtgaatgcagtgccccttggagttcagaagtggttattggattccctggagctggagtgacagatggttgtgagtttcatgaatccaggttctctgcaagagcagtacttgcttgttttttgcccatccatcagtgcatgtattaaccactgaggaatctccccagcccatccttatattaattaaaaaattatcttttttgttgttgttgttttgttttttgagacagggtttctctttgtagctacctgccatttcactgagccctaaattttattttttgaagcaaggtttttctctgttgcttagagcttattatttttctttcttaaactattaacctgagttggatgtctgggatttacatggtcgaaggaaagaacttactctgacttccatttttgtatccatggtaccccctccccaaatgtaaaaataaaaaaaaacaacaacagtggcatatgcctttagtccccaacacttgggaggaagaggcaggcagatttctgtgaattcaaggccagtctggtctacaaaccaagttccaggacagtcggagctatatagagaaactgtctcaaataaacaaaaaacaaccagccaaacaaaaaagacattttcctctaaatgttcttaagtatacaatattgtagacagtaaagtcttattctaagtcttccagatcttctgactggaaatagaggtacctctgaagactgagtggtggcactcatgaaggcgtagggagggaagagagaatattcacagcaagacttcctacagtttcaaggtgagattacaaagtgataggcctgcagtggggtggtggtacaggcctttaatcacagcactcaggaggcaggggcaggtggatttggggtgtgagttggaggccagcctggtctacagagccagttccatgagtcagggctacatggagaaaccctgtctcaaaaacaaaacaaaacaaacaaacaaaaaaaaaaaaagaaaaaagaagaaggaaaagaaaaagtgataggtggcctggagagaaggctcatgggttaaaaacattggctggtcttttagaagagctggggttagggttagttcacaaccagctaaaactccagttcagctgatgtgacatctcttctggcactgcacgcttgtagtatccagacatgcacacaggcaaaacattcacatgaaagaataaagttaaaaaaaaaaaaagaagcaataggctattttggactcacactcaacaagctgggcagcattgctataacccagatatacccatgagttaaggatgagaaagggagacagaaaactaagggtagtgttgaggaacagacacaaagttagtcctggtaagttttcatctttctttttgcgtttgtagattggcactggctcaaacctccatagtgtttttgatggtttccaggaagatcaaaaaagtaggagactggggacaatctggattctctaaacactaaattgaggatatttaggaccccaggaagtggccgattttctccccaatagcttgtctatttaagtcccccttatttttagatgaatcggagtgggtgtactcctgagtcacctatggcaaagagaaggggcttttaggagcgtcttccggccaaacttgaggatgggagatgagaatacaaggaagtgatctttgactcagcctgcccagggcttgggtgttgtggcattccccacaagtgacgcactcccaagcggggtgacctcatgtatcacgggacttattcccaccactgactccaccccatatcctcctcagcttctcatcctctcacttaccagatcagcctccctttcaagatcagagagggggtggggtggctgcagcctagaaatgcctttcgtgggcggggagcggagacaaccagggtttggaaaaatgcgagaagtggcactcactttcccttctccagatgctttgcacttctggttaaggctatccctactcttctctaaccccaaacagtagatcttactcgaggcagccttatcctttagacagtccttctcttagttacggttgtacccctctttctctttttgccgtatttctgagtccggaattctcagtaggaaggcagtggttggagtctcggctctctttcctgctctagctgcgtgaccttgactaacccacaacttccccgggcctagtttctttgtctgtgagacgggccaaacgtctggcgcaccacgaaggcgctgtgtaagctgtggaaaggtgaagacgctagctgtctcgtcgggaaagagttgtcaccctccagagcccctccctttcctcagggagcgctcagcaaacccagcctccctccggctgtcacttcctccacctcccgcctcccagcccgcgcggcgctggctgttggcgtcacagccgtcgcaccgccgccgcaaggccccgcccccggccgcgcctggcctcccgcgggggccccgcccaccgggggcgacgcggcgccggctccgccccacgggtgacgcgtagcgcgcgcggccgggccgccccggcagttggtgcagcggcggttggggtgagtgcgcttaccccacccctcccctcctcggcccgggccccggcccccatcccgtggggcccagccccagccccagtctccgccgtgcccgtcccgtgcgggcccgtgccgcccctcagccggcgacgcccggggccgcccgcccgcccgcccgccaccatggagctggagga

SEQ ID NO: 21 - DNA, 156904 bp, Cricetulus griseus
  >scaffold_12 dna:scaffold scaffold:CHOK1GS_HDv1:scaffold_12:32514411:32671314:1
  misc_feature 29384..29483: /note="n is unknown"
  misc_feature 54385..54484: /note="n is unknown"
  misc_feature 128212..128311: /note="n is unknown"
  misc_feature 154671..154770: /note="n is unknown"
actcagtagagaggaggggtggaaagaaagcgaagccccactaatcaggagcgaggaaactccttccatggggtctcccgctctgctccgcagcctggttggtacctcgcactaggaatctggccgggttcggggcccaacccccatctccaagcattcactcagcccgggaggcagcaaaccctttatccctccaagtccagccgttccctcctcccacccccagctgaagcgctcctcccggacaccccacccccggcctcctgctcccactttcctcggcgctccttcgcctgatgcactcactctctccacccccagccactcagctcaggtctcctcctgcgcggacgcctcctcagcagcagccttctctcgcgcctctcctacccctggagccttcgggcttcaccactccgaggccgcccgtaaggacccaccgcgcggggccggaggtcgagggcccgggagaggagcccgagaacccgggcagcgaccactccagcagctgtaacaaaccagcggcggtagccaccccgctggcagctctggccgaatcagctccctgagccgggcctcgtgacgtcactgccacgcgcctaaacacgttgtgcctcttgggaagtgtagtttctacgctgcctcgtcacccgccctcccggagcctcctgggagttgtaggctttcccctgggctacctctcccagctcactgcgagcttctgagcacgcacggcagaacgtctctctccctgacgcaatagtgagatcaggtgaagtctctttggtgcgtaacaatcccagcttttgcatctgcgccctttaagacatgcacaagcggtttgcccaagctctcgttttttttagaccaagagactcagttttaagtaacttgcaataagaccctgctgagatagtctgaccacaagtgcagagtttttttttccactaaacgtctcagactctagaagccgagaagcacagccctttgtcctgatggagcccctcccacctgtctccactagggatcacattttcagaaccttggttggggtacttgtctgtagagacgggaggctatgggcatcattggtacacctggtcgctacatttaatccttgctggcgtgggtctggccgcatcctggatctccccgcgtcgggtttcatctgggatgtgtgtcataggaaaagtccttacgaacagtaaggagctttgagtctgtgtctcgggttagcgtgtgtggcttttggtaatgtgcctctggtatacaactttcatgtcttgaagctccaaagagaagggcacagattttactgctaagtacatatagtgcaggtatgcctttattggcagtgtaatcctgagcaaatgactcgtattaatctcaattccacagctgtgaaaacctacctccaagggtgttttgatgtttcaaaagaatgtaatataaagcacctattacattgtaggaactgaactaaataggtcttaagctcttctgggccactcccactgtccgtgtcaacaagaaggcctcctttcggttgtttccacttccccgcccatcttctaagtcccgtgcccttaagtcctggcacggctggaatgacaggatccgatgttaatagatgtcaaccggcaggctgtaaatgcacgatgaaccgagcgtgcagagacaggaaggagaaggcctgcccaactacctggagagctttttccttagacccacccatcctctgggagctaccaggaaatagttgtctcaaggctgaagtggtagccctgggagcaagttgtgagtgtacatttgaccttcgcaaagcagaattaggcagcttctcaagtgttcccagagtcagaggccctttagatcctgacatctaagaaatgatcctagctgctgaaaaagcctcacagagacctgctcagcattagagtcaaaacaatggttgatttttttcccaagtgaaccttcctgattcctctctgggagtcttctattgtccatctagttggttgagctctctggatctttgccagttttctctcatgtctgtgaagatcagggtctacatctcaacaaggcactctgactaatgtagagtctattggcaaggtcacaggacatgtcatagcctattaataactcctgttatcaagttgtttttcacaatgggaatggacaaagttccagctctttctgccttgtaagttgtggatcacattccacttgcgttagctggagtccctgtcatcatccctaattctctagcctcataattaccaagtcttaccataattacagcaagcaccctttagcagtgatggcctgagcactgttcaggcagagtggcagcactctcatatggcaccagggagcatgcaatcccttggacaaagaattggcactgtgtgccaaggaaagaaatagtccatgcctcgaaggcatgattgtactttccataccacattctaagaaagtgaacccatgtacctgacaacatccagcaatgtctatagtagtaaaatcctgagagcaacctaaatgcccaagaaacgggtgaacattctatccacactgaatagaaaaatgtgaaaccatttatggttgtagaaacgatgtgtcagcatgcaaaactgtttccaggttatatgaaaagataaggatagagactaagcatttctcaggtgtgtcgtcagcaaaatctagatcaagggaagcatgtggacctggtagtgagtgccaatcatcccagcagtctggaaagcaggggcaggaagctcacagattagaagtcagcctgaggaatacaatgagttctagcagagcctaagctgcatagcaaggctctatttgaaacaaaagagctaggccaaaaaatatctagggctaactctgggtaaaagcccctgacacaagcctagccacctgagttcaatccctggaaaccatagtagaaggggagaaccagctcccccaagttgtcctctgacctctgagagtacattcacacatgcaaacatatatacacacaataataatatacatttaagactttaccttattatgcagagatatgtaatacatatacatttatatgtgtatatgtataatttatatatttgtatatcacacacacacacaaagtgagaggggaaagccaggtgtggtggcacattcctttaatcccagcagttgggaggcagaggcaagcagatctctgtgagtttgaaaccagcctggtctaaatagtgagttcaaggacagccaagactaagtagagagactctgtctagagagaccctgtctcaaaaaacaaaacaaaaaatttttaaagagatatattctaaactttttgtggattgaatgacacaatacctggatttactaaaaagtaatatggattggagacattggaaaataaacagccaaaagctaataattattaaaattgactacagtgataattattaaaactgggtggcagggacatgaggttcctcacattatttcctctattttggtgcttgaaattgcccataataaaagaattttgtaaatctgaatatgaatttgtgaatatgctaagcaaaactagagtggtgatctggcgtcaggttcggctctctgctcctttgtctaccagctctgtgaccttaagcaagtctctgaacctctctacttcagttacctcatctctaaacagagaaggtaatgttcatgacacctcattcattgatcttaggatcaatagggtctataaatgtagagagcttgggaccatccctggtacatagctaagtgctcggtacaggtctgctgttagtcttttccagcttggaatgatgttgagacctttactaggctatggaacgtcaacaagagagaagagacgttatactagggtggacagaatcaggactatcttttcattctctactttcaacctctatgtaatgtgatactacttttaaatattttatgaaatgtgttttttaaatttcacaagctctcccttccctgtgcaggctgctcagtcagctgaggtgctcacattcctcagccttggagtgtgattccatctagggctggagaggccctgcttgtgacagacacacataggtgactaagctggccacctacatgcagacaggaaagaaagccacagcggatgctgggaagaaggccattgagaagaggagaccccgattccctgtcccgccagctggggcactgggccacaaatgtcaccccttcctctgcccctccccacctcacccctctacttccttcagaaatgcaaggaaggaaaaagctatgtgcagttatgtttgtgcttttgtttgggtgtaggacaccccagcacagggaagaatggagcctgggaggttggctgtcatgggctgtggagggcaaagactatctggccagtcctctgggcccccaggcattgcctgggaaccagaacccctccctctgggaaccaagggcagaaagttaccttcaggaacgaaggtattccttgatatgacccacggacattctttctcagaaatgaaagcagctgagaacacaggatatctttcggaaccagagggcaaaggatataaaatcttatagcttcgagactagaccctcccagctgccctcctaactgagttcctgctcctaggaggcctcacctagctagaaattctaggtggcctccactcccagaccactcctccccctgccagaagccagcccctcttgtaggaaatatctcaacaaatgttgttgggtgctctctatatttccagggcaaagggctttatgtgtgtggacttgcagctcggcttcctgtcttagactgcttgctccaagttttaactcatgtgtttacatttcctgcacagaacagagctgacaaatgaagtatgttcctgcacacgaatcccagaactcagttgcccatagggctgtcattcctagaacacacctgcaccgtcttgattttgcctcagtctctaatccctctccattgtcttttccaccttacagatctctgatcatccctaaagccctcactcagctgttaccatcactgtgaggcctttccctgtgcccaggtgatgcccgctgctccatcctctgggttcctcagaagcctcaggacaggagagtgcctacccctaggagaatcacactgagacaagatagaaagatgaggaaaattgctgggtggtctgacacacctttaattccagtgctcaggaggcagaggcaggtgtatctctatgagttcaaggataacctggtctatggagggagctccagatcatccagggctacacaacacaatgaaaccctgtcttgaagaaaagagagagagagagagagggagagagagagagagagagagagatgagaaaaatcttagggacacaaaaagtaaaaggatcccctcaacccagatgtctacacttctcacagccatgcagcaggaatcccagcacaggtaacaagcactaaagaccattattgcttcccagtaaaaccctgcaatttcccatgaatcgcacctgaaaccctatttacaaggcaaggacaagtgccagatcctgggcagcctagttgctccttatcagattataatttcagctaagtctctctggaatcactttatttatcttattcagtgagagagagacagacagacagagagagagagagagagagagagagaggttttgtagcaaccttttgagatgtagcttgagtgctaccaaagggtttgtgtgtgtgtgtgtgtgtgtatacagattttacacatgagagaaaacatttgataattacttttctgagtcttacatgctcaacatgaagatctgcagttacatctattttcctgaaaatggcataactctactcttctttatggcaaaacccctcatatatataatatatatatatacatattatatatatacatatatatgtatattatcttatatatattatatattatctttagacatagagcaaaggattaccaacctacaacccacacctccagagaatctaggaaacaaggagaaccctaagagagtcatatatggtccccaggagaaggggaaaggaacaagaattgagcaaattgggagcatgggggggagggagttaggagagagagaaggggagaagaggaggtgtgaggaggacatgaaggagcaggaagattgagtccgcggaggaatagaggagagcaagaaaaaagataccgtaatagagggagccagtataggtttaaagagaaaactggcgctagggaaatgtccagagatctacaaggatgaccccaatgaagattctaagcaatagtgaagaagctatcctaaatacccttcccctataatgagattgatgactaccttatatgccatcctagagccttcatccagcagctgatggaagcagaagcagagacccacagctaagcactgagcagaattcctggaatacagttgtagagagagaggagtgatgagcaaagggggtcaagaccaggctggtgaaacccacagaaatagccgacttgaacaagggggagctcatggaccacagactgacagctcggaaaccagcataggacagaaccaggccccctgaacctggttatcagttaggaggcctgggcagtctatggagtctctggtagtggaacagtatttatctctagtgtagaaatggacattgggagcccattccccatatagggatactctctcagcctagacacacgggggagggccttggccctgacccaaataatgcacagaatttgatgagcccccatggaagacctcaccctttttctggagcagaagagggatgggttgggggtccgtgggaggtatgggaggatgggagggagagggaactgggattgataaataaaataagattgtacctagttaagttaaaaagataaaaaaattaaataatagtaataatatgtcttgctgggcattggtggctcacacctttagtcccagcactcatgaggcagaggcaggcagatctctgtgaatttgagaccagcctgatctacaagagctagttccaggacaggctccaaagccacagagaaaccctgtctcaaaaaataataataataataataataataataataataataatataataataaaatatcttattacattttctttgtccacaccagttgttttcaaggctaccagtatcctattgtgtagctaaattaaaggaggggcttatcttcccacatagtgaaaggaggtacaaggggagggagatgtctctgacaggcaacagaggaggcaaagaggaagttcagcttaacacaactcggtagccagtgttgtttcaaactttgggtttctgactccaaatggtttattttaggcattttcaagcaccgcacgattttgtggaaactattctggtcataattaactcgatgctgtatgcacagcaaatcacacataaattatctccttgagaaacaaagtaagctaaattcagatcagacgtgtctacattgaaactctttgtaaagtccataaagatgggttctgtagattgactgagaagaacaaatttacgataaggctctaagggaggatccagtactggaaaagtgtccagtcactaggctagaaagcatgttccctatggccttctggatgaaaaacaggttttgcatcccttcccttgaaggaacaacccattgtgatcaacatctcaggttccctagtgcttgtcagtgagcacaaagatctctgcaccccctacaaggcttctgatgactgagtgactcagtgatgtccaggccaacacctcacttggagctgttcctctctgctgtattgtcccatggtgacaagatagctagactgcccctccctgttcaaagcacagagacaagaagggcctggccccatactctcttataaacaaatcaaagactgtcccagaaaatactttagtcaacccctgagaagtcactggctggaatctggaccagctgccaaggagctgggaaaaatgagccccatgattgggggtatctgaaggaccaatcaggctccatcaacagagactgcagatctgggtagtcccccaaatctgagtggctgtcatagaagggggtaagggctagatgaaagccaccaagttctactacatatcctatctgtgtttcaagttccttatacatgtcaatcgaggcagacattaatgtatggagaagatttgtgtcaacatgtctatgttacatagtctcaacacaggctcacattagaaaatcctaggcaaagttggagacatactagtgcctagagtcaatgcatgaagattttaatgtacttgctccagattagcctctggaattaatttttttttgagacagagtttcactgtataacaaccttgactgtcctagaacttgctctgtagaccaggctggccttgaactcacagagatccacctgtttctacctcctgagtgctggaattaactgcatgcaccaccactgggagactaacatgtagactgttttgagaaccactgctatagacacagcgccttaggaacagggtctgttctgtaccctctccgacccacacatgagcagcaggctgacaagaagtcctcactacatgagggaaccaaaaatgggggaggttgcagagatggctcagtggttaagagcacctgttgctcttaaagagatcctgaattcagttcccagcacccatgttctcttctggcctcctccagcacctgcactcatgtgcatatatttctcaacatacacacacacacacacactttgaaaaaaaaaacaacaaagtaagtcttctaaaatgacagggcataatttctcctctaatctctactaatctacacacggtagtgaacactgtcataactgcagtttcttctcccctcagatctctcatttcctgagccctgtacttggcctccctttaataagcacaaccacagctccaggtggcctcttctatgggcagattgccagctgctcttctaactgccctgtcggacagcccagtctcactctggcgtggcaggtgccctagtccaggaagataactctccagaaacagccaggctcaacccttgggccttggctaacccccctgctggggtgagagaacagcaggatagcgctcccatgcattcagtggcagagtgtctagctttaattcaaaagcaacccacacagaacaaatgcatctgactcttcagaagattcagaacccatctgactcttcagacagatgtgaacctgagacgtgtccctgctaacgtcacaagaatgagtcagaggtgaatacatccccggggtgatgacagctggtatcctactatctggtcctaaccccaccacacttctaaaactgcttgttccaaggtaagccacagggacagccttatgacatgtaatgtccatagctctacgaaagcccacatcaatgcctggagaaaccttgggttgggttttaaactctattactaccttcaaattcttatgtttttaaacaaaaggcctcacatttcattttgcaccagactctacagctttgtgactggtcctgatcaaacaaactcatacaaaatccatcaaggcttgggaggctaagggaggagaagtgtaagttcaagaccagcctgggctatacagtgagtttatggtcagcctcagctgcgtagtgagacactgtctcaataataataataataactggttgggcatggtggcacatgcttttaattccagcactcgggaggcagaggcaggcaaatctctgtgagttcaaggccagcctggtccacaaaattagtcccaggacagccagggctacatagagaaaccctgtctttaaaaaccaaacaataaaaaataataataaataataataataatctgaagtctgacttcagcctccttaaagtgtctccctgctactctgtgacactccacattcctgttttcttccacctctagtgggagtaagccagagagttccacacaagatctccaatggtcaaagaagcaccaagtacttaagtatggcgtggaggtgagagagatgccagtgaggaggtgagagagatgccagtgaggaggtgagagagatgccagtggggataggaagtggttgagaaattggagaaggctacggtctttgtctggtcactgacataatacaagtctagtcattttgggggcctccatttacccacctgcagtctgcaagggttcccctggatggtcccttcttttgagctcccaaccatgactgggagcactaaatcctgccccaaactggagaaggtgtgggcaagatgctaccccacggggccaggctgggaggtggcagcagtggttggctggcccgtgagggtcaaggaggttacaagcccatgagctaaggtattgggtgggtcgtctacaccagtggttcccaaccttcctagctctgcaagggtttaatatagtccctcatgtccccaaccacaagaatattttgttgccacttcgcaactgcagttttgccactgttctgaattgtaatgtaaatatgtatgtcttccaatggtctaaggtgactcttttgaaaggatcatttgaaaccccaaatgggtcatgacccacaagctgagaactgctaatctaatggccatccgtaacgatggctttgggtcactcctgcctctgcagagtatgggaggtaaggtgcagcaggacaacctgtcttggtgttttcatcatgaaaccagactgttctgaaagacagtaatgaaaacagcagcatttgcatttcgccgccacaagctctctcctgtctgctccaccacgtggggcctctccacgctctgctttgtttggacacaagggctcagagtcccacacaaaacactctgtggccgcaaatccctccttgctaccacccagtggacaccagaggaggggatggagtggagtggtggggcctgcaaaaggccttaggatgaagaggccctgaagaataagtaagttatcctagccatctttgggtcacaggcatgaagaagaactcaaaatgccatcctagaagcccaagaacatcacagcacagaaaagatggcaggataactcataagccaccatagcaggcttcaggagccttcaagaacattgagtaaccgtctacaacagcaaaccgaaactgaactacagcaccccctggtggtcagggggttggccctgtgaagatccaggtgcatcctctaagatgtttctgaggaagactgaggaatgtttactaacaaaaggccccatgaggcctacagagaacacagaatcgagggagaaggcttgtgatgcaagttactgaggtgtaattgcagggttctgcccccagggcaaccaagaagccatccttttggccagccaggctctggacaagcaaaggaggttcgggaaggcagttttcagcagcagatagaaaatagcaaccactgagttgtgggaggaaagcctggggcaaggaatggaatccaggcctgttctcccacacatagttcatcaggaactaggatctgctctctcttggcattgcctgaccaggccatggctcaggtatctgacacctggggcagagagtcacatgccaggaaactctatacacttgggccccaggtcgcagcttccagctgcagcaagcaaactggacttctgaaggaggaagcggttctccagagcccactggcaggggaactacatccggggagaaagcacaggagaggattcttgccaccaaccaggtgagaggcaggaaggagaaggaagaggagggaagatgagcagggccaaccaagagcacagagctggggaaggcagagcagtagatgcttccagaaaagagggttgaccagcatagaaggcggggccagaagtacctgttacctacttaaacagtctagctgcacaccctggagttctatcactaatcggtcactcttgcctttacattagtgccaaccagacctcctggtatttacctggcctcccccacagtcacacaggcacgtgaaggacaaaactattcatttcaagaagtaaaattactataaaagcagaagcaataatctaggacctcccaggcccatctcaacagggcaacgggacaaaggggcctcacagattaacctcctagaaacaatagaacattaaaatgtcaagcctaaggaattcttgctcttagaatcctgttgaagacagacagacatacctacggtgggaaaggccccaatggagagttctggcccaaagagacaccaccaaggggctcaatcaggagagcacttccctgagacgtagtattctaactttgctcttcctttataggatcttccattgcgcagattctcctcggcacaaggattatgatcatctgtgaccatgcttctactagctcctcgcctcctgcccctcctgctggtgataggcacaggggctcccgtgcccagccctcacacactgccccagggatgctacatagccgaagaagccggcgaacagacattccgctgcagccgggctggcctgagtgccgtgcccagcggcatccccaacaacacccgaaagctttacctggatgctaaccagctggcgtcactgccagctggtgccttccagcacttgcctgtcctggaagaactagacctgtctcataatgtccttgtccacctctcaggggctgctttccagggcctggagggcactctacgccaccttgacctctctgccaaccagctagcatccgtgcctgtggcagccttcacggggctgcagatccaagtgaacctgtctgccaacccgtggcgctgcgactgtgccctacaggaagttctcagacaggtgaggttagctccaggctccgggacaggcatcgtgtgtggtccaggagcccgaccagatctcgtgggacaggagttccttctgctgactagggaggaagagctgtgtgggacaggacgaggtgggacccgaaggagcactgatgtggccctgctagttaccatgggaggctggctgacgctggtagcggcttatctgatccactatgtgtggcagaaccgggacgagacccggcgccccctcaagcgggctcctgtgcagcgtctggtgcgctcagaggactcctccaccctcagcacagtggtctgaagcattgcgcagtggtctgcgctcttggccttcgctcgcctttctctactcctacggcatcccctaccccatctgccctctatccctgcccgcctccctcaataccttctctggttcacttgtcctctctcattctcttactctctcgccctttcttctccagaacactacctttggagcctggatttgggggtacctccttctatacctaggctgtgcttgactcagagaatccaaaattcctgaatccaccgcgtgggagcgggggtgggggtgggagtcagaattaacaaccatctcagtcggcagcaacgcagagggagaagccagtagtttcggaacataggggaggatcctgagcctgggcctcaccgtacagatgtgggtaatgacgccaaggatgacggctttgaggggagctagggagatggttcagtcagtgacgtgtctgtcctgcacgaggacctgagctcagatctctagtacctacttaaaagctggacacaagctgggcgttggtggcgcacgcctttagtcccagcactcaggaggcagaggcagggagatctctgtgagttcgaggccagcctggtctacaaagctacgcagaggaacttgtctcaaaaaaaaaaaaaaaaaaaaaaaaagctggacacaggatgggtatctataacgccagtgccgggtggagggatgggagtgtgggagagagacaaacagatccctggagctcattggccggctgactggcctagccagtcagtaagctccaggttcagtgaagccactgtacactgaccggaaataagggggagagcaattgaggaaggcattcaatggcatgcatcaacctctaacctatatacacacctacatgaacacacacacacacacacacacacacagagagagagagagaaagagagagacagaaacagagacagagacagagagaatgagggctttgggaaggaaagagggagtatacgaaagaaaggatgatacaaaaacacttggagcatgtgtgtgacaaccctgggagtaggagagggtgtggagaagggtgaggaagtgctggaagcaatcaggagatgaaacaaaacggtacagccacattgagaagggcctctgggctcttcccctctgctccctcggcatcctctccacctcccttcttacctcttaatcccaggcattctccttgtgtcctctaccccaggaccccttacatcatggtcccctacttccttccccagaattcccctgctcctctcccctctcctttatacactgacagttttcctgagctgttcccctttagagactgaactagggatggatgacaataattgggggcagagcagagaccccagaacatcactgagcaactcaattaaaaaacaaacttttatgagcatccttggtctctttctggttgttcattttactgaacatgtgtggtctggcatggaggagcagaatgtggagccgtaaccaccacctcccccccctttgtggagtgctcccactgggctacctgctcacccatctctcttcctgctttggcccctgacattagagtccaacagtaggagaactaattaatcaattattaattaatgaactaataagaacggaactggaagcatgcggaagtcaagagagaaggtggcctggcttcgacccttccttcagctctgccaggaatcggggagaacagagcgggccctaagatgccacaagtcctgtgaagcaggtgggtggctccctgatgttacacacttaagagcagcagaaaagagaaaactaaacttttccaagagacacaatatgtcaaaactaacctcttccacttggatgtaccagagcccaattgcccagtctcactctaaggcaaaattccagataccttaggtggaggcaggccccacctgttgtgaacaggcagcttcctgaagtcggctgccagcgtagagaagaaagggagaagagactccagagccttcccccgctagcttcactctgctccttcctcagagagccccaggaaactcagaccaagaaaagaaagtcttcttgtctggggagttctgaactgagcaagctaagccgttccccagactagagacggttccccaaagcctcattatctacaaaaggggctaggtagagagaaaacctggaatgctgaagcctatgtccacaggaagtgagaacaagactggaacccaatctcctgctctggtagaacatacacccttcctgtccaagggacggaatgaatcgatgggagagaggagggtagcgccaggggcgcagctaagaggaaaagagggtcccggcttcacccaaccaaccacaggaagctaaaagaaaaaaaaagccagagcaattgaagctcagattggacaaaggtgtggagacgcttggacagggaggagagacaaggccatagggacactccacgccagacctgccctgcccatggttcccttcccaggggtggcaaaggaatgaagggagacagcaagccccagaaagcctaggcttctgttcctggagtagaagccctattagaaaccagtggctactgcccggtacccaaagctcaatctgggcgtgaacacacggggtttcaggtgctagaagctggggtggaggatgaactgcgatgctgaaggacttgattccgctagcggatttcttactaagggaaaaaagtactaagccggccccagcgtccggctgcactgactggggacaacgtgacaaccagagagaggccgtaggcggaatgggaggagcttgaatggagtgggcgggattgcgtggtgcagggcggagtaattagggggaggggggaatgagctggaggcggggcccagggggtgggtggggcccgagtgggaccgaagttaggtgggaggtggcactgaagcaggatgggggctcagctgagttacccagacaaacaaagaaccgtagcataacagcattgaggaccgccactggtgtggtgacccggagctggacggtgactccaggactggggagaagcaaagtggatacttaagacgactgggtgcgtgagcaaattgagagcatggaaagaggggggagggaactacgagaatgagaagggaagaagaggaaggatgcagaggtcatgagggagcagaaaggttgtgtcaggtgtggattagaagaaaggataagcgataggtagtgtttagttgggggggtgataggggaggaggggcgggagacgggaactgggattgtcatgtaattcaatcttgtttgtaattcaaataaaaaaatttaaaaaaaaagaatcatgagcaattccaaacttaaaaaaaaaaaaagacgacggggtgcggggctggttatccaaaggtatggtacaggctgctggggcgggagaagggcttaaatgaggccctaactgagagattatctttagcctccgtgagagcctggagcttttgcccttaggaatgcccactcacctccctccggaagattcctgttgctcgaactgctgaagtatctcatctgcctggtgatgacccaattggtcttgggagggaggcctggagacagtccttaaacagccttgagcagctgctggagacttctagcaaactctactcccagctgtcgaggaacgtgctccacctgctgggctctgcgtggtcagggtcagaaacgaggagagagcaatcctctacgcgctgggactaccaggataggcatagtagcacgaaacagaacctactgcatagtttgtaggtcttaatgtaaaaagaacgtgcagaggtatttgttcaataaataaacaaaagtaggctgcagaggacccacggtttaattcccagcccccacgtagcagcttcagctcacaactgtaactccagtccccgggatctgacgccctcttctggcctccgtgagcactgcatgcacatggtgcgcactcgtacacgtgaactaaaaataataaacaaatataaaaataaaaaagacgccgggcggtggtggagcacgcccttaatcccagcactcgggaggcagaggcaggcggatgtctgtgagttcgaggccagcctggtcagagctagctccaggacatcctccaaagccatagagaaaccctgtctcgaaaaaaaaaccaaaacaaagacaaaaccaagacacggtggcatacggcatacgtttataatcctagcagtgggagagaaatctgaagtgggaaaaccaccacgagtttgaagccagactgggttatataacgatactctgcctcaaaacaaacaaacatattttttaaaagagttaaactggtcttgctggtgcactgcaattctagcacttgggaggccaaggcagggagaccagaagaattcaaggcagttaatgtggagactcatcgttggtaaaaaatgctcagactgaatgactcgtgagtgttcagccctaagtgggatatcgatatcacccccactccaaggctccagaaacatcatggaagaaggggtgaaaagatcggaagagccagaggatggggaagggtgctatgaatgtcttctgcacgtggcatgtcattgcacccatgaacttactcagcagtgagtactgaaataggacctgcacaagattaagccggcagcatcagccagcatcccactgagcagcactaagtggactcagtcagggagagagagtaaggacatgaagagtggggaaagggcatgttggggttcacctggggtagtaggaagggagagttggaggtgtatggccaaaatacattgttaccaagtactacattgtcaagccaggcattggtggagcacgcctttaattccaggtggatctctgtgagttcgaggccagcctggtctccagagccagtgccaggataggctccaaagctacacagagaaaccctgtctcctcagaaagaaggaggaggaggaagcatgaagactagagtttgcagccccagaatgtatgtaaatgctgggtggcttacttgtaattacagcattagaaggtggagatagggtcctcgctggagcaagctgacaagctagagtagtatggatgaggtctgaattcaactgagagacttgcctcaatgaataagacagagaccaatcgtcaaagactcccaatatcaacctcaagacttcataagcacatgcaaacaaacacatgtgaacatgcatgcatgtgggcacaccacacacacacaggaaaagaaaaaaactttttaaaaaatcaagaattatacaaggggttagagaggtggctcagtggttaagagcacttgttcttgcagaggacctgggttaagttccaacacccacatggtggctcacaaccatccataattccagttccaagggatttgacacttcttttctggcctccgtgtgcaccatacatgtctatgtgggcacatatacatagacatgaagacaaaacacccataaacataaaataagtaaagctaaaaaaaagttttaggatcagacatggtcatacacacctttaatcccagcaatagggaggcagagacaggcagatctctgtgagttcgaggccagcctggcctacacagtgtgttccagaacaacagggttaagttgagagaccctgtctcaaaaaaaaaaaaaaaaaaagcaaaaagatttattaaataaatgtgggtttttttcttcttattcaagatggactaagatgccttaggccagcattagaccaagtatagtgcctgtggccactacacaggttgcatacccataaagccacccctggaaccaagccacaggggaggtgaagcagagtatgactgtgttgtccactcctccaagaaaaagacaaatgtacaaacccatatacctctcctccaccacaatcattttccaacacagagagaaacgttcccttccaggagtttcctctcaccctctcctggtgtgcggtcaatcaactcccagtcccactacacacacacacacacacacacacacacacacacacacacacacacacacacactggctcccagtcccactacacacacacacacacacacacacacacacacacacacacactttaactccagctccagaaccatcggacagtcccccacttcctgaagggagagcacaccctctcctttcctttacctctgcaggactgagagcagtagtagctgctggccacaaccctggagacagacctgacagacaaacggactagtgtggcacctgggttataggataagcctatgattacaaggagggcaaaattgagttggaactcatttagctgtcatggctgagtctgataccttcaggcccagcccgaaggctccttgtccatctcggctcaaccctgagactcatagactggaggattgtcaatgatgaagatggggctgaattttactttgcttgctgcaggtcacctctgaaatcgatggctctccaagtgcaaagcatttcgtggggttttggtcatttgttttgttgttttctctccagtgcatatggagagcatcctggaccagaatttcttccaagcagaggcaggttgttccagcttcgtgtctagatgctcaatgccatctggaatgaggcactggtaactaaaccctggtcatgatggcaaatgtccatatcccagaactcatgaggctaaggcaggaggatcagtaagtagttcaaggccagcctcagctacatggacagtttgaggtcagactaggctacatgagacactgtctaacaaaacaaaacacacaagcagacaaacttctctgtgcccaaatccaagaaagagccttgtcacagacatacagtccctaatagtccctccatgagccttaccacagacttgcggtccctaatatttcctccatgttttgggcactggccaacaaaatccactctccagatgttctgtcctcctgtaactatggttatagaaagtaaattggagccttgggataagttgggagggagggactttggttctaagctttccttacctggggcccaagctcttcatagagaatgaggaagctatgtcccagcaggcaggtctagcgatctccaccaccagccacatggtgggcaagatgccctgatgcctgtcactttggagtcatcaggggctcaggaagagtagaggtcctggggggccagctgacggaagaagtttctcagaggtggtgctgtagtctctatgcttatacaaacttgacaattgggaaagggcgggggaaggagggaggaggcagaaaaggaggagagcaaaggaaaagattaaaaaacagcaagtcagcatggtgacacacaactgtaatcccagcactcagatgactgaggcaggggagtttgaggccagcctgcactttatattgaggggggaggggaagaggggagaggaggaaacaggcggtggggtgggggggtggggggtgagaaaaggaagaagagcacaggtgcagaagcaagaagagaggagaactgcaccccaaaactcttggcctccagtatgagatataaacacaccacccccggggcagctaactcctgccccagatttcccatcatgtcttcatctccagcctctttacttccctttacttgagaaagtctggggatgtgtctgtgaggagacactgtcctcagcatgctccatgccctgcaaatgcatttcagaacctcctccatcccctgacttgcagacaccagatttccctgttcttgccaggatcgatgactctaaaccgtctgcttttctttctttactctttggtccctgccaaagggaaaagtcagcagcaatgaaaagaaaaacaagcaaggaaataaagccctgtcttgtgtctgtgtctgtccacagagaactctgcgatagaaagagacaagtctcccaaagagcatgcagcagggggacttcctccttttcccatttaccagcaacacacacacacacacacacacacacacacacacacacacacacacacacacacacacacacacacacacacacacacacacacacacacgcatacaagtgcatgggagtcaggatcggggatgagcgtctgctagcacttccatggattgaccaccagagggagataaagatcaaagcctaccaccaacttcagtaccaagggcacagcgatttctttccagtttggggttaagccactttttctgggtttgtttgtttgtttttgttttatcctcactctccttctccctcctccagatctctggtctgacctcaggaattcttacaggagctggagagatggttcagtggttaggaatgagtactgctctttgcagagggcctgaatctgattctcagaactaatgtaggcagctaactatccatggtaactccagctccagggggatcccacaacactggcctccatagcactcacacacacacacacacacacacacacacacacacacacacacacacatatacaaaattaaaaaaataaataaagggcctggagagatggctcagtagttagcagcaccgactcctcttgctgaggacccagttttgatacccagcactctcatggtggctcacaaatcattcgaaactccagttacaggggacccgacaccctcttctggcttctgtgggcaccaggcacataggcttctgtggtacacagacatagatgtgggcaaacacacacacacacacacacacacacacacacacacacacacacacacacacacacacacacacacactaaattggtcccacttctaagaacattgactactcttgcagaggactgggtttagttcccagcacccacttggtggctcccaaacacctgtaactgcagatccaggggctctgatgctgtcttcttgccacacttacatgtattcaggtaaacactcttacacataaaaataaataagaatttaaaagttcttagagtcatctgtagcacaagggtaaccccaagttcaagcataaccccaacactcaagaggttgaaacaagaaaatcatgtgttcaaggccaccctgggttacacagactctacacacacacacacacacacacacacacctgctgtctttgataataagcaaacaaactccaaggaggagatcaggcatgtaaagaggccagggcaccctgcatgtgaagggcagcagccctgggacacacctgaacttatttttgtttcctccttcttccttccttgagccctctaagcccagtgcttaaaataccattagtcagtctggggaaatggtgcaacaagatagaaataaggcggccgtagaacaagaagaatgacatcaggctggggagagagctgcatgaaggaaggacagcaagagaaacgaaagaagcaagatgagagaccagaggaaagaactgaagaactggtatgggggctttgggtcctcaggcagaacaggcatgtgtgtgactttactcagctgctgcttcatagatcttttaaagatgaatgagacaagaaaccttagccatcagccactggaggaggacagactctagacagaacctcacaaatgtctggcccaggtagacgtcagtcgggcctccttcccagggctgattgagagacaggagcctgcacggcccctggaccataaacgacagtccagactccttaccagtgaagtgattcaaagagacagaggcagaggccgaaatctgggggggttgggaggacaagttagcgtaacacacaaccacgtggttacacatggatgtgagccacatgacagaaactagacagccaataacagccatcccacacacccaagccccccaaccttgcctctcctgtgggtgatggacacctgacaacaagcaacggctagagctgtcttagtggctgatgctgtaccagaaaggaatgaagtggatgggtagggaggcaggcaaaagggtgaaagatgaggagaccagagaggcaggacaaagcgttggtgcactttgtgacacagggaggagtgatttgagagcatcgccctattgaaggaggttttgcgaaagtagagtaatgaggggtttgtggttgtttggtttggtttgggtttttttgttttgatttttgtttttcttttcaagacagggtttctctgtgtaacaacagccctggctctcctggaactcactatgtagaccaggctggcctcgaactcacagagatccacccacctctgcctcctgagttccgggattaaggagtgtgccaccaccgcccagctgagtaataaagtttttaagaagttttgtggactatgagattatcgcctcatccctgccagcccctgaagtctatccctgcctcctcagacatgtgtgtcctggtatcaagctgtgcccgtgtagtcagcaccattggagagaggcaggtatggatcagcaggctggtgcacagaaagaggcagggcaggtcctcagcggctctgctgcccctgagcatacagggtttcttatcgattatcacatccacaggcctcagatgaatcacacatgcttcccggtgggccatgatgacagcagagccgagatccatcccttctcacccatacacgcagaccagcacacgctcgggtgtacatttacacacacaaccaactgccactgtctcccgtgctccccaaagtatccacaagcccacttgcagttgccacttcttctctctcgatcccagctatccacacctacgctggcacctgcttgacaactccctacccaccccctcatctcttaggaggccagggcccagggcctgaggcggggcacaagagacaggttggtgctgttctggaagtggaacaaaaagggtggggccattgagacaggcagggtctgaggaagcctgcatcccgcctccacagaggcgtaaagcagcctgtcctggtaagggacagtcattctgtcaacctacagacagagcaagctctgggccttccccacacacccagctgccggacaggacccagcatcactccctccctggtaagatcaatgacagcagaggaggcaggggacattctgtgtgtctaggggaaaggttgggaccaaaaacgtgtgggatttcttatcttttattgtggctgtaaaattcccctggatatcactgggagtaggtatcatggtaggcttcagagacggatgagggaggcagcccttcgaatgcctctctggtggacagcctgtcccagggccgctcatctggtccctggaggttatcctgtgtcactcaagcccttctgggaatgagggctgaaaagcacattggagatggcagggtggccccgaacatctgtgtctgcacctcctgtcctcctacctctgtcaagtaccacaaataggtgaggtccagttgggcgctaggcatacgtctttaatcccagcacttgggaggcagaggcaggcagatagctgtgattttgaggccaacctggtctacagagagttccaagagagccagagaaactatctcacgagagagagagagagagagagagagagagagagagagagagaggagagagagagagagagagagagagaggagggaggcccatggaggctatcagatgggtctgcatccacccaccgggataacctggatgtgtctgctggttgcccaggcgatgaacctggacttcaaagacagagagctaagatggtgaacttcaggtccttggacctcaccccaaagtgtctctcagggtcatattcactctttcctggtgctgatgctgcagaggtgactaagccccatttcctgccctctgggaaacttcagtaggcgagactggcagatgaacagatggtgacaagatggattagcaggtgttttcggaagtggatctacaaggtgccttgggaatacaagcagagtcactaacatgcccaaaggagtaaagggctgagcagctgacctggattgagtcttacagctgaattctttcttactggaaaagggatatactgtaagcagaaataacaagggcaaaggagtgaacaggacagagcctggagaaccaggccacttgcagccaagttgctagaaggcaggtgtgagggatgcacagggtccgagcaaatggaccctggccaaggaaaaggcagctgggaaggtgcccagctctgactgcccaggctattggccccagaggggggtgctccctttcttccctagtgtccccaggtcctggatacagctgtaacctagtgtgagaggaagccttgcttcctctactgctgacacgccagctgtgctctgtgactgtgaagaagtgagcatgtaataagaaaagagtccttgacaaaggggaggtctgtcatctcttgcagccatgtgaattctgcagcccaggattcttcatcaccaaataaaagactccttgagttccttccggatccaacattcagaaacccaggcctctctaaggtctcccccagctctagcagtgaggcctggtgacctacagtgacccctctttacaaagtccctcctaggtcttggtgtcctcggcagccattgtgacattctccatctttttctccacagagacgatgactatgtttgaaaatgtcacccgggccctggctagacagctgaaccctcgaggggatctgacacccctagacagcctcatcgacttcaaacgcttccatcccttctgcctggttctgaggaagagaaagagcacgctattctggggggcccgctatgtccgcaccgactacacactcctggatgtgctggagcccggcagctctccctcaggtcagcctctccatagagctgggctttaagggttcccgaacgactagggccagccatctggaccacaaggaagactctgaaggcttcccttgcctgatgtggttaggtgtcaccaaggccaaagttctcactgatgctgaggtgctggtggggatgcatcctgtcttttccctcccgcagatccaacagattgtgggaactttagctttaagaacatgctggatgcccgtgtagagggagacgtggacgtgccaaagacagtgaaggtaaaggggactgcaggcctgtcacgaagcagcacactggaggtccagacactcagtgtggctcccaaggctctggagagcttgcacaaggagaggtgagagagggtggggctgattgggtgatgggagggggttgggcagtgcatagaaggtgctctggaccagtgtggaagggtaaaccttcaccctgacctttctcaatgtagtctccacaggagtagggtggtgggtagctcaatggtgaggtctaacaggtacaaggggaatcctttgcaactatggatgcacccaagctgtttcctaaacattcttcccatcctccagccacctccggtgtcacttccccactgtctcacacacacacacacacacacacacacacacacacacacacagagggagagagagagagagagagagagagagagagagagagagagagagggacacaggtgttcatattcacttgctctgtgtgtgtgtgtgtgtgtgtgtgtgtgtgtgtgtgtgtgtgtgtgtgtgaccttggaaaagtcacttcccaaggaacttgtttgggttttttggttgtttttttttgggggggggttgttttatttttgctatagaatgacgagaatgggtgatagtttctaaggtttcttcaaccctaagattgtgaaacataatggaaaaggcagtggtcagtagtaactgttccttacagagactgtcctgagctctctcccatgaagcaagctgtagacgggctccatctgcacacctagggaatgctgccccagcagacaggggtatggcagaaaggatgttcatacaaggctctggcacgtgtcgagcttgacaggggacctgacttttaaataattaagtagtggttaaaagcagcaggtgaggacagaagaggtcggaaggaatggcttagatgtttgacacgtcacccagtaaacattcacagagttctcactgagcgtaaaacatccttttatgtgctggtgtgcctagaatgtcatgtccaagaaccttgtggtgtaggagggtgaaaaccactgtgtaagagtaattatctagctgggcagtggtggataattaccacctttaatcccagcacttgggaggcagaggcaggtgaatctctaagttcaaggccagcctggtctacagagtgagcgccacgatatcagggctatctggagaaaccctctctctaaaaacaaaatcaaaacaaaagagtaattatccaatgcaaggagtgacaggtgcatgaggagcgctcggttagacttgtggcagcggaggggggctcctggctggggaagtaaggcaaatcctcacaaagtggtgctcttgggtttaggctttgagtggtgagtataaatgcagagagggaggagaagtatgttgcaaaggcgcgcaggtgagatatctcaaaaccaagaggggccatagaataacagacacaaaggaggcacaaaaggaaggagagaaagttgtagggtctacctctgccactcgggaggcagaggcagacctagagcaggtaggaaccagaaactaggtcaaggagcccaacaagtagacaccagggagaccctgaggttactctgatgtgtctcatgaccgacctgaccaggtggaagacgtgcattagacaggagcagggatctcaggaaagatactgtcccgccatccatcagaggcatgcaatgaggacatgagctgggcagtgtggccagaacgcagggaggaatggtgcaaggcttattgcaaaggacaatggaatggattaaactcagcagctgagtgcagagtgatgatgacggtgttgttaaagatgactctgagtcttgacttaggttgtgacattacaagacattaaaggtgacattacaagaccagaaagacaggagagaggtagttctgtagggatggctgccagctccctttgtggcacagctggggtaccacttgataatggtcaaggagtagctgggaaaggggctgggagctcaaagaggggtcagataaagatgaacatgtggcagccagcaagatacagatcaagatggcaggaatcaggtggggagatgaggaagctggagaatacttagagagagggggcataaaaacagaatctcggggactagagagatggcttagcagctaagagcatttgctgcttttgcagaggacccgtgttcaattctcagtactcacattgggcagctcacaaagcacctgtaactccagctccagagggatctgatgctttcttctggcccccacacacatacacacaaacattcacacacacacacaccactaaaatctcagagagcatacaatattaaggttccaaatcgctgggcattgatggcacatgcctttaatcccagcactcgggaggcagagacaggtggatctctgtgagttcgaggccagcctggtctacagagtgagttccaggacaacctccaaagcaatacagagaaaccctgtcttgaactcccccaaaaaaaaagaaagaaagaaaaagaaataacgccagcatgatgaagatacagacagtgaatatggagtatcttttgagatatttgccaataaggtgaaggaaaaaagtaggttggtaatttgagggagtgttctggaaggaaagtgggtattttaggggcagagacatgtatgcttacatatggaagcaagaagaaggagcaagtggagatgaggccctgggaatggcaagaggtgagattgtagatgaagagacggaggggatggtccacatctgggaagacctgagtgtaatccccagagcccacgtaaaagctgcacatattgtcatgcttttcaattccagggttcttacagaaagataggaacagatcagagacagaagaatccccaggagggtgaactggaggaagaaggacccagctagcctggtgtatgcagacaacaaaagatcttatctcaaacgaggtggannnnnnnnnnnnnnnnnnnnnnnnnnnnnnnnnnnnnnnnnnnnnnnnnnnnnnnnnnnnnnnnnnnnnnnnnnnnnnnnnnnnnnnnnnnnnnnnnnnnacacacacacacacacacacacacacacacacacacacacacacaccagaacatgaaaaaggagacaggaatctcagacaagcgaacagagccaaaagggagaaactgctcctgggcggtaggacgagaggaggaagtgaccatgaggcctcactgccaggccaggtgctgagcctccggctgtttgcccagtttatcttgcaccctgggaggtagttggcgtcatgtctgttttatagatgaggcaacgcagactcaaagcagctgccctgccaggaagccagaggtctgagttagcgctgcggtctaatctgagccctcactccttccctggcaccttactgtctagatgctatgattgacagattaaaaagtagacactgcagggcataatgacacatgcctttagtcccaggcaaaggcaggtaaatctctgtgagttcaaggcctgggctacgtagagagctccaggccagccaagactgtataatgagaccctgtctcaaaactataataatataaataataaataaatacaaagcacccgacacaggccctggtgaggagatgctgagtgatgttcctatgcttctcctccctcaggaaactggcagcagatcacccgttcctgaaggagatgagggatcgtggggagaacctgtacgtggtgatggaggtggtagaaaccgtgcaggaagtcactctggagagagctggcaaggcagaaggctgcttctccctcccattctttgccccactgggactacaggtttgctctacacacacacacacacacacacacacacacacacacacacacgggggggggggggggggctccattaactgtgactgaatggtgcatactcagggcagaggaccggaaaaaaaaatgtccaaagccaagttggccacacaaccctctcctctgcttcgtggtaccaagcaggaccagtccctatttcatataccacagacaatgtggagcaggccaagtgctaccgagtgtgtcctcatcccccaccccccaccccctaccccactcccacccgccaaaagctgaagagcagcgctctgccttggtttggtggtacacaccagtaatcccaagcactctgaaggcagaggcccgaagggtcacaggttctaggtcagtctgggctacctggtgagatgcccctgaggtgtgggtagtttcttgctttcagaaagtccttacttatagatgagacacacagttaaagcacagaggatgtaggcttggaaaattcagtagaagtaagtgtatcacttctatctatacatatatttagtgagtgtattcatgagggatggtctgggattgggagccagggaggacttagtcatggaagacttcctggatgaactaagactggggcagctggtgtagaggaaggaggggctggggcagagagaagctgggaggcaagacaggatgatgcacaggcaggtgctggagcaggtctgcccagtccccttcatgtgtccaaaccagaagcagaccagaagcccagagcggtagagggtgagcgctagaaaagagtgggaaggcttcaagtccagaccacagagaaagacagctggaggtccagctggaggctttccaaccgctggtctcttcaaggctctcacacccagctccgcacctgcccctgctcctacctgggatctcagaggactcacggatattggctctataatcctagggatctgtgaaccacaaggaggctgtaaccatccccaagggctgtgtcctggccttccgagtgagacagctgatggtcaatggcaaagacgagtggggtgagcagagaccagcatgttcccctcttgagataaaggtcacctgcatcctggtcctctcttgcaggaatgtgaggggtgggggaggcagcatattgtattgcccactgctggagatgagcaaaggctgctctagagaaggaggggaaggagttccctcttctgagttccaggtgtctctgggcactggggaatctgtggggagtgatacaaagaccaaaccagcctctgaccacaggaggcccagggaggagacagatcctgctgacaccagtactggatttcaggggagaaaatgctatcacaggcgaggagagaacttacaagtcccagcagtaagggtaggatagagaattagacagggcatttgaggggcagaatctaaccctgagcgggacccttcgtcttgaggatgaagaaggaagggtgtggcagctggtgtgacctcttgggtgtcttctcttgtctattacagacattccacacatctgcaatgacagcatgcaaaccttccctccaggaggtaggtggcctgcttacaggcttgccccaatgttatctgctgaaacctcccagcctctaacagcagcagctcctatttctcccccccccccctagagcatctgctcttactgcctgggccctcagacagatagagatattgaatataaatactgtcccaaagagacaaagaagcagaggccagaggcacaattagaaacagagatttggagacaaggtgtgctccaaagttatatggatgggtgtgctaacagtaacaaggcattgaggctgtcttgacaatggctttagtgcaagacagcaaagggtttgtcctgacagatgtgctctgtgttttcagaaaagccaggagaggagaagttcatacgtaagtgtccctttcttttcacctctttcttcaagaagagattcttgaagagattcaagttcaaatctcttatcttcctccatcctctgtgggactggcagggaagatagtgggaccggcctcagcaaacagcactccctcaagtatggcagaacttccaacaggaaaaagccatggaaggggtagatctgtggacaagatgtgcaggcgatcggctgcctcagacctttgttgtcaagggcctcagtagctgcaacctgttccacacgcagggcaggaggtgctgagtcactcagttgctgggtgacaccaattctgtctgagtgctcggttcatattctattggctcttctgctccatgccatacccaggcatggagcaagaggattctgaagatggctgggagctccaaggggtggtgctgtctcatcgtctcccgagcctcattgcctagggatggctgccattctgaaggactgtgttcttacctgtctgtttccttcttattttctcagttatccaggcatctgatgttggtaaggagtttggggaatgctttcaaggctttaccacacaggtagggagagaagcattagggtggaaggaaaagggaaaagtccgagtcccaggtgctgggatgagagtcacttccaggaagccactctctccaacacagactgggtgaagttttaggatgtcaggctgctgctcactgcctgccctggatatagaccctctgccatctgaagcagtcccagcctacctgtcactaaattgtcaaaggcatcatcatttccaccaactcaagagaaggggaaataggcttcccctaaatgcctagctggagtggttgaaaacagaagtcaactgtgcactgataagggaatgaaacctggtggggagcgaggggggaggggagggagggaggcgtgattaactgttagttgactgcatggggtctagtccacctccatgctccatgttttatgacgaggctttagcataacttcataacacacattggtaaagagggaaagtcatattgaagccggaagcagggcactgggtcctgagaaaggtgtgacagagcctacagagagcatgtactgagtgggaggggccaagcgaaggggcgtctgcagcattgactgtgccctaggggagatgcatgaagacttcaagacattaaaagaagaggttcaaagagagactcaagaagtggagaagttgagtcaagtggggcagagctccctgctcacctccctcagcaatctcctaggaaagaaaaaagagctccaagacctcgaacagacggtgaggtcccattgggaaaacaggaagtgtgggagaaggtatgtctgggaggtggtggaccattgcggatggggagggggaactgacaatggcaaggagtggccagaggctatggaatcaatagcagatacttttccaaggctggccaagggtagctaggctgctaggccaccactgacctcttagtccctggaaggagcatcggtagagtttttgaaaggcatgtgcgccctctgctggtcagagggtagcaacaggccgtggcgccctctgctggataacaacttgaaccttccagcgctcaaaacccagggaccaaggacctgactaaacaaaaaagaaataggaagtgggagagagtcagcctgagtccagtgactattgtgtgctgggtgctgggttagacctttacctgggagattagtcatccagttttcctcacagcttgaaggagctctagacaagggacacgaagtgaccctggaagcactccccaaagatgtcctgctgtcaaaggatgccatgggggccgtcctctatttccttggggctctaacaggtgagtgagacgtgagtcagacagttttctctgttataagaataaatcacgtgtgaatgaatgagtgggtgccagatggtttatactacagtagtttatgtatacattttttaaaaatttgattccagctgggtatatagttcagcatacaaaatgctaaggggccctgagttcaaaccctagtactgggtgaagaaaaaataaccattagtttcattcctagggattcagttggttatttatttgtttatttatttaactacacctttaaaccttctgcatgggagctaagttcatcccttccacgttgttgcccacctgttagctttaatttcagagagtagtcagtcatctgatggctcagtgagtaaaggctcctgctgccaagcctgacaactgaattcaattcctggaacctacagggtggagcaccactcctgcagttgtcctctgctctccacacacacaccatagcatgcaaatgagtgtgcgtgaatgcatgccagtgctcgaacacacacacacacacacacacacacacacacacaatgtgggggagaagctggacacggtggtgcacacctttaatcccagtacttgggaggcagaggcaggtggatctctgagttcaagaccaaacttacctacatagtgagttccatgacatccagagcttcactgttatcaataaataaataaagtggaggtgggggaaagaaactttctgtcaaatgccaaacccaaaggaaacctctcaactatgaccctctaaacagcctgggctgtcaccactgtgatagctcacgcctgtaatgcaagcactcaggaggctgaggcagggcgatcactgtgggtctgaggccaccttgggttgcagatcctgcctcaaaaacaaacaaaaggcatggctttgtcttctgcacaaaactgcagtgaaagattagaatttgggtttgctgtgttttttagtgcctggaacgcactatgtagaacaatctggcctcaaccttgcagagatctgtatacccctgcctcccaaatgcttacattaaaggtgtatatgccactttactcagtcaaggatcacaactttttatttaatgaccagcaaaggtgtgtgttatagagcaggtgttcatctctaagtgggtgggtaggtggatggatggatggatggatggatggatggacaggcgggtggacagatggacaggtagatggatggagtcattgattttagaatatgcaggaattctgtaacttcactatttggaatctgtggttccctctgtaccaacaacacacttttctttctctgcttttccctcagtgctaagtgaagcccaacagaagcttctagtaaaatccttggagaaaaagctcctcccagtgcaactgaagctggtgagaaattacaacagacgccagggagaattctttccggagggggcagccaggatcagggggaacttacaggggtccctgctttattccaggagccctagatgtttagggtaatcagcctgcctgggggaggaggggttagttcctccttttcatgccactttggtcccttgcaggttgaaagcaccatggagcagaacttcctgcaagataaagagggtgttttccccctgcggcctgacctgctctcctccctgggggaggaggaactgaccctcacagaagccctagtggggctgagtggcctggaagtccagagatcgggcccccagtacatgtgggatcccgacactctcccgcgtctctgtgccctctatgctggtctctcccttcttcagctactgagcaaggcttcctaatgccccttctctgccctctcccctaatgccttcctgaccttactgtgctctctgtaacactccaagtcaccgcagagcctccacgctgaggataactgaaaagccattctctgctcggttctgcagcacatacactaaaactgaaatgccacgctgtcatgcatgctcagcaaatcccaccgtctatcttccttctgtcctccacctcagccacccactaagcccatctccggatacttatttaaatcctgaagatacaaaatctttcaaaatctttgcaaagttaagccatttcaataagaaaaacaaacaagcaaacaaacatcaacttcctagttgaatccttctcacttctgccttaaaaaaaaagctacccttactggaatgaataaaaaacacggtgtggatcctaggacaagctatattctggttttttgttgttgttttctgtaaagggaatcattaatgtgtcccaggtaaagaaacagttattaccaatgtgtacatgattctgctcacactgtccttaggctggcaggaagatgctccatgaacccagtgggttagaacacacaatgtccgctctgcattgagaagctcatcaaaacagcaggagttcaccatgttctctagttctacttgagggcttgggagagggaaaggtccacaggtatatgatacaagccccaaacaaaacaaaaactttcaagtaggttaagcaaaaactgcaggtgatcatagtgagacccccatgtcaattttttttggaaaaaattaaaaaagaggaagaggagcctggtgttggtggcacacacctttaattccagtacatgggaggcagaagtgggctgatctctgtgagttcgaggctagcctggtgtacagagcaagttccaggacaggttacaaagctacacagagaagccctatcttgaaaaaaacaaaaacaaaaaacggggggggggggccctttgagggtcaatcgaccctttcacaggggtctcctaagacagtctgaaaacaaagatttgcattatgttcataacgtaataaacttagtagtaaaattacagttgtgaagtagcaaggaaatttttgtttttgtctttgtttttgtttttcgagacagggtttctctgtgtagctttggagcctatcctggcactcgctctggagaccaggctggcctcaaactcacagagatccacctgcctctgcctccggagtgctgggattgaaggtgtgtgccaccaacgcccatcggaaaatcattttatggttggggggtcactacaacatgaggaactactgtattgaagtatcaaagtgttaggaaggaaggttgagagccaatgctttaaatgactttctttctttctttctttctttctttctttctttctttctttctttcttccttcctgtcctcacttcaggatgggtgtgggaggaaatagtacagataggcttggcctgtatatcttaatctcatcaaatttctgggttcacgtcaccctccacacttcttattggggggtgggggggaaaaggtgcctgtgggccgtgccatgcttgtatgggtctgagaacaactttggggagttggttctctcctcccatcttgtataggatccagggactgacgtcagtcaccaggcttgtcagtgagaaaaaccatctcaccaacccaccagtatctccatctcctcctccctcttacgtgtatgggtattttgcttgcacacacaatatatacatatattaccacttgcatgcctggtgctcttagaggccagaagagaagtttgggtccctggaggaaactggagtatagatatctgtgacctactatgtgcgtgctgggccctcggtctcaggtcctctggaagagcagccagtgctgttaacctctgagtcatctctcaggtgtgtgtacgggcgtgtgtgtgtgcgcacacacacacaccaatctcctttaaagtattttatgagtagaatctatctccaagatttcaggcccccacttcttactgacgtccttgcccaggccagttcctccacacagcaagaactcatgaccagcttagctgccaaaagcttcatgtgtagccatcctcccccttcttggcatcttcggaagcccccaggttctactgcgttcttcttgttcatcctttccttgtgatgtaaacttaataaagaggcgagctagcatctcaactatccagagaaataacttctttgctcggaaggatgaatgacaaaactggtctgtttattcctttactgttcccactcacctgcagtccaggatgtcacgaggtccttaataagtttatgcctgtcctcgttagaaagctctgttccctgtctcccagcactgaggagggaaggtgagaggacagcttggaagaacaggtcccaggtgtgtgccctaaaaccggagcacacatttctgtttggcaagtgattgccaaacagagaattatttgtcactatagaataaaaataatacagaaggtaagtggggacaccagaaaggtgactcagcagcacttgccgccaagcctcatgacctggcttcaattgccaggcctcacgtgctgggcagagaacagacttcagaaagttgtcctcacatacatagtagggagagtggcccccaaataactaaataaacacaatttttaaaaaaaagatatgcagggagctggacaaattgctcagtggttaagagcagtggctgttcttccagaggacccaggttcaattcccagcacccacatggcagctcacacctgtctgtaactccagttccaggggacctggtatccttacaccaatgcacataaaataaagttaaataaagtatctttttttaaaaaaaaaagatatgcagcttccaggtgtggtagggtagataaggatctagttgccttttaccccagtgctctggaggcagagggtgaacgtctgtgagttacaggtcagccagggctacatagttgagactctcaaaaaagaaacaaacaaacatgtcctaaggatttagaagatagtcaggacacatctgtgtcttctaaatccttgtcagagcatgggctgagccagtcccagctctgtttacagagagcaggtttccatgctggagttgttttgtgctttgagaaattggcccctgtatcttcaaaaccagtgctgaaggagtcctgtggtaaaggaatgggaaggctttctggtccagttttcttccattcgtgtgtcccacggaggacatcattctgcccccattcacaggtgtctgggtgtacaaagaccttcacaaactgctccctagagccccttcagcagagactccaccctcctcctccatccccacagcaactgcatgccagggcagaacatacggagtgccaacttctttctcaaggtccctgtgatatcaccaccctttctgttttcatttagaaaagatggtggtggtggtgatgatgatgaggtgtgtgtgtgtggtgtgtgtgtgtctgggtctgtgtctgtgtctgtgtgtgtctgtctgtcccatgcaacagctcctgtgtggaggtcagagaacaactttgtggagtcagtcagttccctccttccaccttttcctgttttccaggaatggaactcctgagtcctcaggctggtggcaacacctgtatctactgactcaccttgctagtccagttgttttgagtttttgagaaggcatcaaactctcacacttttctggaactaagtaactcaggctaacctccaaataatgacaattttctcagcctcccaagtgttgggattactggagtggagcatggtacctgactggtacattatgggctctcgctctctttttaaaaacattttttatgggggcatgccacagaatgcttgtggagttcagagaacaacttgtggaacttttttctctccttctaccatgggtcccaggtatcaagttcatgacttcacaagtgcctttatcccctgagccatggctccaaccacattattattattattattattattattattattattattattattagagacggttttttttatgtaggtctggctgtcctggctggcctcaaagtcagagaccagtctacctagtgctgagattaaaggagttcaccaacacatctggccctacattacattctttttgtttctttgtgtttcgagacaggtttctctgtgtggctttggagcctatcctggcactcactctggagaccaggctggcttcgaactcaccgagttcctcctgcctctgcctcccgagtgctgggataatagacgtgagcagggttttgcaatgatcctgtacgcactggccctgagccatatacaactattaaacttgactagttctacacaaataccccctaccccaacacactcccaggctgcagaggtgatgtgcctcatattcagcactatacaaaaacttgacaagaaccgggccgtagtgatgcactcgggaggtagaggcaggaggatctctgtgagttcgaggccagcctggtctacagagcgagttccaggacagcctccaaagttacagagaaaccctgtctcgaaaaacaaaacaaaatctgacaaggaagttcggatgccacaggggttgagctcagttcaacctaacagcctagctacaagtacacaggttccttttcttcccggtgatggaagcacccggcgggcgttgagagcgcgagccagacagatttcacggagggcctgacctgcacaaaccgggcgagcctgccaggcggggaagagaaaaaaaaagcccggcaacttgtgatgtcatctggatctgcgctcggataggccctacccacttacgcattggagtctgtagtagcccagattggagcctaagctgacctctcgcggacatccagagatacgcactcgagaagaagataaaatcaccactcttaagccctcctcccctttcctagaaggtccgccttcatcgtgcacctcggctattgatttctttcccctccctagactcggccatcatctcgctgggcctggcatttcccagaagccccagcgccgggaaggagtttgcagctgctcggtcatcgtgcggcccgacgcgagcccgcgctggtgtgcaggcccgtctctgtgcctggtctctggtgtgagggtgtaggcgaggcccctgcctcggtccccggactaggccgcgaccccgggcgccatgaagcaggagggctcggcgcggcgccgaggcgccgacaaggcaaagccgccgccgggaggggaacaagaaccgccgccgccgccggccccccaggatgtggagatgaaagaggaggcagcagcggggagcggctcaacgggggaggcagacggcaaggcagccgccaccgagcactcccagcgagagctggacactgtcaccttggaaggtacgggagcccgcgtctgggacatgccgcgatcacgggtgacagcggccacggtgatgcgacttcttcccgggacctccgcgcagcctccacctacctcggttccgtgtgttcggtcaatggggcgggggtcggaagtgcccgccctgccgctctcgaccccagccggcgactggacctgttctccaggctgcggattgctctcctcacactccctccctcttctcgtctggggttgcatcttggtcccaccgagccttttcttgagtccttcccagtgatctactccttgtacaccccatccaaccgatcctagcgcctccgaaatattattgatccttagaaatcagcgtttgtatttgtgtctaaagaggccggggtaacatcacactggccccttagataaaagagtttctaaagggttctgtagctccatcttcagcgaactccctaggagaaccatttctaccctgcgttgcttccttacttctgtaattgaagtaactaaaccgtcccgtcgctctgttcctccctcttgaggtccttactccctccgttcctaaagagttcaagcacatacactttcactcctgaatttgtcttttggttgttgtttgtttatagtgcttacctgtggcctcgattcctataagccacccccatcctcaactttttccttccacatgccagttctcaggctcctattatcctcgtgtccctcttaagttgctgttttatttttcccatttggtccatcctgtccatgtatgaagtgggtggggtgagacttctcattgtgatcctgtgcggttttccaagtacgggaatttttccccctctctctctgcttaactacttcaaaacatggagataagcaagttatgccctgcgaggtacttttgaggatgtgtgtatgtgtatggactgcaccaactcctactctaaaagttggcaacaggatctgtatacagaaaggtctttttacctgaaataaaagtagccaggggcggagatgtcactcagcattgcgtgtgtgtgtgtgtgtgtgtgtgtgtgtgtgtgtgtgtgtgtgtgtgtgtgttcgtgaacattttattatggtttgtattcactgtagaaattttgagatgtgagaattctaaagtaatagggagaaaaatataaccaaagttaacatgttttcctgtgtgttttcaagctgttctataactgaaatcactgaagtacccagttaggatcaaagtattagtatgtaaagattttttttttgtctttttttttttcttttagcatgtccatgaacacaaagttcaatttattcaggaagcatttgttgattactcagtatagtgattgagattatagactccagaatcagtttccctgtttgtgtaagtgggattaatagcattaactgtttgttgagttattgtgaacattagaatgcatgttactatttgtaataattagtatcacaagcacgctttgttgagtgggaaatgtgactaagaaacttccagttgattgcattctcttaattgctacatatttaaagtttttcatgttccttgctcttttaagtagttttgcaatcattgtctctaatcctaagttttttaatctacttttgtagctatttaaatgtagcttggaatttatatgcctaagtcaaaaagggtaaacatgtctaaatttaaatttgtgtttgtatgagtgttttatctgtgtgtttgtaacagtatcacatgtgtgcgttgtccacaaaggctagaagaggacatctgaccccctggaactatagttatggatggatgtgagctgccatgtggatgctgggaatagaacccaggtcctttggaagagcagccagtgtgctcttaacactgaaccatctctccagccccatttctaatgctttttatgttgtcctgaaaatctgatttacattataaatgttttttctcattactgtaaatgtttctattttcagatatttagatattaccaaaatatagtctttatgtcttttatcggtttggcatcctttgcttatgtccaatgtccacttttgttttgaagttagggccagtagtctctgtctctctctctttctctctccctctctcagatttatttatttttatatgcattgatgctttgcctgcatatatgtctgtgtaaaggtgtccgatcccctggaactggagttacagacagttgtgagctgccatgtgggtgctgggaattgaacctgggtcctctggaagagccatctctccagcctccagtactttctcttaaccagttatatacattctttgtgaaatgaaacgtgaatctgttcatttgttgcacatatttttctcttgttgacatggtttctcaggaggcttttttgtagttacactcatcattcctgtgtgtctgtctctgtgagatttctctactatttacaagtctttccctattttgagctctgataaaactctgataaagcttcttctactttgtttctcaactgttttctcttctatgcctttctgctatcctctaccctatcccctatttttccttgtttcccagttatgtctgaaaagtgttgcactgcatccataaatgttgcttaactccagccgggcgttggtggtgcacgcctttaatcccagcactcgggaggcagaggcaggtggatctctgtgagtgagtgccaggacaggctccaaagctacacagagaaaccctgtcttgaaaaacaaaaaaaacaaaacaaacaaatatatatatatatatatccattgggctaaaaggggtaaatctacatattcatactgccccctttgtaagtgctccatggaacttcttctcctgagtggtgggaaacaggaggacttggaagtaacttctttttcttctctggtcctctgtagacatcaaagagcatgtgaaacagctggagaaggctgtttcgggcaaggagcctcggtttgtgctgcgggcgctgcggatgctgccgtctacgtcacgccgcctcaaccactatgttctgtataaggccgtgcatggcttcttcacctccaataacgccactcgagacttcctgctacccttcctagaagaagtgagttgggctaacttcaagggtgtctgataggattgcagtggtctcaggtgtggtggcttcattcttaagtcatgccttttgtgagattacagaaatctttattatattctgttgtcagcctccttgacactccaagaaaaggactgttttttaactttgtatgctcagcacctgccaaattctttgtgcatagtaggtactcagtaagtgtgtgtggaaacccacagagagtgccccataaactcttgttgattggtttggctgcacttctccatggtaactctgtcctctcctagcccatggacacagaagccgacctacagttccgtccgcgtacaggaaaagctgcatcagcaccccttctacctgaagtagaagcctatctccagctgctcatggtcatcttcctaatgaacagcaaacgctacaaagaggtacccaggatgccgtgggaataattagtgagccccaggcctggggggggggggtatctccagtgaagaagtagaggggatcactgtgaactatcttgcctttccgcccacctccccaagccaggcatggcagtgcacacctacaatcccgttgctcagagactgagacacactaggagttcgaggccagcatgggctgcatagtgagaccgtgcacagagtaaactttcaaaaatctttaagaaatagtagctgggcgttggtggtgcgtgcctttaatcccagcacttgggaggcagaggcaggttgtagacctgtcccacccggtccatagccatttagtcccaaataaacacacagaggcttacattaattataaactgtttggcctattgctcaggcttcttattggctagctctctcttaattattaacccatttctattaagctgtgtatctctacatggtcttggcttactggagaatgcccaggcttcctgccttcctggtcgctacatgccatctcgagactcactctctcagtccctcttcccagaattctcctagtgttgtagtcttacctatacatcctgcctggctacatcctgcctgtccattggccaaaacaactttattcatcaaccaataagaggaacatattcacaacatacagaaggatatcccccatcagcaggtggatgtcagtgagttcaaggccagcctggtctacaaagtgagttccaggacacagccaggactgttccacatagagaaaccctatattgaagaaagaaagggagagggaggaaggaagaaaaggaaggaaagaaggaaggaaggaaggaaagaaaaaagaaatagtagcagtagccaggtggtggcggcacaggctttcaatcctaatactcaggaggcaaaggcaggcgaatatcagagttcaagaccagcctgatctacatagtgagttccaggacagccaggactacacagagaaaccctgtcttgaaaaactagaaagaaaaaaaaagaaatggcagctaaccaggaatggtgtgtgtcttacctcagcacttgggaggctgaggccaaaggattgatagaaggcatatatgcacatgcaaataaaagtaagaaattttcaaaattatattttaaaacagccagctctgtgaggctggagagatggttctgctgttaaagagcactggctactgttaaagaggacccaggtttgattccgagcacccacaatgggctcacaagcatctataactccagctccaggggattcaacatcctcttctggcttaggcaccaggcaggcatgtgatgcagcagatcactcatacacatgagacaaaaaggaaataaactctcgcttctggcatgaagcatttccagtaagggacattggctattcaacctgcactacagttctgtcacttgccaggttgggccatggtgcttgatagttgtagctacacaataggtgttactctcttcatgttctgttttgttctttttcacatcactgttctgtttgcttgttttgttgtgtttgttagataaaattcatcctctttgtgtatacagttgggtggttttcctgtacacacagaaggctgtacagccattagtgctaacaccaagggcatgttctttgctgcaacacaaacacttgccaccctctctcttcccacaaaccaccaatgtgctttctgtctatggaagatctgcttctcacgcttagtacaaagtttaaagattatgcagagggtcatggcatagcatggatcaatgagcacatcattctatgttcttttaactgaagatggaagctaggatgtcgtttatgctcatgctgggcgagcactgagccactgagccatacccctagcctgttgtttttactttgttttggtgcagtgttttactctataacccaagctgacctgagacttgctgctgtcctcctggtgggatcacatttttgtgactggttaatactctattgcatataccttactttgtttattgttgctttgcttgtttagttttgtttctctagcccaacctagcctcaaactagttcttcctccctcccaagttctcgaattataggatgcagcaagcaccacacttgcttcttttatgttcttcagctcccaaggaaaccttgggtgattttgaataatgtaggtagtagcatctgtctatagccgtttgtgtgtagctgttcacagttctcttggatatacacttaggagaggtatcactggctcattcttctttgacgtttggaggaattaacatgtggttctcttttgccccccaacctcctgccaggcccagaaaatctctgatgacctgatgcagaagatcagtactcagaaccgccgagccctggaccttgtagctgcaaagtgttactattatcacgcccgggtctatgagttcctggacaagctggatgtggtgcgcaggtatgagtccccaaggtctccaagggatcagagccatgggcatcactactacaaagttgtggagagaatgaggaactggtgggtgtgaggttctgtctcagtcactgttctgttgctgtgaagagacaccgtgactaaagtaactcataaggtttagtctgttgtcatcatggcagcatgtgtggctctggaacagtagctgagagagctacatccttatctgagggggtagggagccagcttggacttttttttccccttgagtttttcaagacaggggtttttctatgtagcccctggctgtcctggaactcactctgtagaccaggctgacctcaaattcagagatcctgctgcatctgcctcccaagtgcttaaatgcttgggcttttgaaacctaagtgatacatttcctcagacaaggccatacctcctaacccttctaagtctttcaaatagtgccactccttggtgactaagcattcaaatatatgagcctgtggggacattcttgttcaaaccaccacagatacccagcaggtgatgggtaatagttagcatgccttgagctttgggagtggtaatccttgctaaacaatgtaaatataacctctgggctttcacaaactgccccctggatttttttgtcaccccagagctagggagggttggtgggtgaatgagttagggttgaaaggacatgctagaaatattttagctttctgttcaaaacctgatacagccaccacacccccaccaccagccttttgaaaagccagaaccttcacagtagtttctgagaactgaactgaccaactttcttctttgttggttcacctctcctccagtacgctgacctcctgttgggcatagcagatgtacttcttagagcctttgcccagaaccctctccccaccttcaagtctatccttccctgtaaccatctcagtcctggggtgagcaggctgcttaaaatggtcctatgaaatggttcagtgtataaaagcccaacaacctgagttccgtccctgagatccacataatagaaagataaaaacgattccccaaagttgtcctctgacctctgtatctgtgctattatcgcacactcacccatacacaattttttttaatagttttgaaaaaccattagaggttttttaagacaggttttctctgtatgacagtcctggctgtcctggaactcactttgtagaccaggctggcctcaaactcatagaagcccttgtctctgcctcccaagtgctaggattaaagatgtgaaccaccaaacctgacatggtttgaaagtttgatatctgcttgctttccttcccaaagtttcttgcatgcccggctccggacagccaccctccggcatgatgcagacggacaggctaccctattgaacctcttgcttcggaattacctacattacagcttgtacgaccaggctgagaaactagtgtctaagtctgtcttccccgaacaggctaacaacaatgaatgggccaggtacctctactacacaggtaagcggggcccccccacccaccccacaaagcaggatgtggctcaggctctgtaatgtagacttttcagggttggtccatttgatgcagccagcactcatcccagataggcacaggagggaccaagtaaagcttttgctaattagcacagtctaggcccacacatgggatactccacaaatcatcaggcaagtgtggttggaataatctaaagccagagtatttgcccaaagaggggatagtggtggttgtggtgaatgccactgcttttttgtttgttttgagacagggtttctctctgtagccctggctgtcctggaactcactttgtagaccaggctggcctcaaactcacagagatccacctgcctctgtctcccaagtactgggattaaaagtgtgcactaccaccaccacctggctggcacttctcttatgacccagtctcctctcctgtacccccaggccgaatcaaagctatccagctggagtactctgaagcccggagaacgatgaccaatgccctgcgcaaggccccacagcacacagctgttggcttcaaacagacggtaagtcaggttatttatccctgcccctcttccttatctgatacccctttagatctccttccctgtgctagagcctgagcttcttgatccttatccctgcggctattccagctgtgagtgcccgagccatcagccgcacagctctctgccagcttatgttgagatgagtttgatgttcctggttccccagcactccaagcagctatcctaggcatggcctggcttgtgttgataagcccagtctttaagtgcctgtctggatgagtgttgtctgaggctgggaagtccagacagtctcattgtgcacagagctgaggggctcctgtgcacataaaccttggccacttcagagccttcagacacaaaaggtctctgggtcgactttggtgttcggcaccatgagtgacaagaaacaatgaagagggcatctctcagcagtggtgtttcaaagagagggagaatgttatctccaaggactgtggggctatgtaaagtaccagagcccagttctggacccagttccttcagctctaggccggtgttcctgcctcggcatggcaccagcctccattgttcccttgtcagtgggtgagcataggcagtgatgggtcagtgtgcgggagaacatggtgttccactcagactgtgccagcctggttctaaagagtaagaaacttaaatttgaactggtttcagagatactagaattttcatacaaagaaatttctagacacatgggacacatgagcagcctggaagattgcttacactataagtcacatactaaagtctctttaagaatcactaaaaggcaggtgtggtggcacacaataacccatgtagttaggagactaacacaggaaggtgacaggttcgaggccaacctggattacagagtgtaagaccctgccttaaacaacaaaaatcattacaagtacagataatgaaatagtgtgtcacatgctggtggtatcgtgtctccttacagtggcatctggggcaggatggagcagagagttggcctggagtctttggccagtgttccgttgatgaggaagcctggggcctgtcccctgtttcacccctttcaaaacttactaaaatataggttgcatcttggcacggagggaggggcacagctatgtactcaggcactcaggaagcaccagcaagaacactgcaagtttgaggccaactggcactgtatattgagaccctgtttacaaagaaatctctctctctcaggcacgtacacaattgatttttctcaccgtgtagccctggctggcctggaactcagtgtgtagaccaggttagcctctgccttcccagttactaagattaaagatagatgccactctgccccagagtctgcatttgagctgtttctcaggtgccagtgctgctggtgcatgggagcctggctcattgtctttagggacagataaaggccatttagcatccagtaatgcagctgcctgtccaccgtaaaccttaaagacaaactttaaaagtcgatctgtgagggatcatgggaagggagtggggggtgaatatgatcaaaatgtaattaggaaattttcaaagaataaaaatataagtaagaaaaagcaggtatattgggccaggcttcatggtacatatcatattccagcacttgggaagttgaggtcgtagtattgttcctaattctatagcaagtacagtgctaacccgggctgtataacctaaactatgtaaggaaaccctgtcttttttttggggggggggatttgaggcagggtttctctgtggctttggaggctgtcctggaactagctcttgtagaccaggctggtctcgaactcacagagatccgcctgactctgcctcccgagtgctggaattaaacgtgtgcaccaccaccgcccaacaggaaaccctgtctttttgaaaaggcaaacaaattcattccacttgcacttctgaagtctaacaggaggtcttactgggctaacatcaaaatatagatgggatgggcttctttctggggaccctgaggagactctggaggctcttggtggcctcagcctgtggtctccttcagagccgggttgcatcctaaccccacactgtgccattccagcctctgcttccctctcatctgctcttttgaggttttttgcttgtttgttgagggtgtgttgagtgggggtgagtgtgtgagtgtgtgagtggggagtgtgcgtgtggtggggggacctctctacatagccctggctgtcctggaactaattcacagaaatccacctgcctctgcctcctgaatgctggggttgaaggtgtgtgcaccacacctgcccttttttttattaaagacttacttttatttaaattgtgtggggtgcctgttaatgtgcaccaggtgtttgtgggttctcacagaaaccaaagaagctgtcagatcccctggagctggtgttacagacagttgtgagctgccatgtgggtgctgggaaccaaactcctgtcctctgccagagcagccagcatgctcaactgctgagccatcctgcacttctccttccctccatcacctccgccctccccctccctcttaagtgtatttactgtgtccgtgtgtctgtctgctttactgtctatgtgtctgtctgcttgactgtgtccgtgtgtctgtctgcttgactgtgtctgtgtgtctgtctgctttactgtgtctgtgtgtctatctgctttactgtgtctgtatgtctgtctgcttgactgtgtctgtatgtctgtctgcttgactgtgtctgtatgtctgtcttctttactgtgtctgtatgtatgtctgtatgtctgcctgcttgactgtgtctgtatgtatgtctgtctgtctgcctgcttgactgtgcactgcagctctgccctccctcttcctcgctgtgggatgagatcagagccccgttcattttctctgtgtgcgccccctgcgcaggtgcacaagcttctgattgtggtggagctcctgttgggggagatcccagaccgcctgcagttccgtcagccctccctcaagcgctctctcatgccctacttccttctcacccaaggtaaggctgatctcccagagccctgccttggggcttggtgtgtgtacccatttacatcagctgagcactcctgtcccctcacagctgttaggacaggaaatcttgccaagttcaaccaagtcctggatcagttcggggagaagtttcaaacagacgggacctacaccctaattatccggctgcggcacaatgtgattaagacaggtgtggatctggttctgtgcagcgtgcagatgggctgtcttccccggacgggccgcctgtgggtggggacctgtctgcccacctgcccacccactgctcctcccacaggtgtgcgcatgatcagcctctcctattcccggatctccctggcggacattgcccagaagctgcagctggatagcccagaagatgcagagttcattgtcgccaaggtgggactggcttgggagccacagtggccaaggatgtgaccttcctgcctgtaccggggcaggagtaggcgggaatttgccagagggcacagcagtaacccagtctcaccagaaagtgccagtaactatggcaaagcaggaggttgccagaaagaatgaatctgggcgtgagtgttgggacagaggaccagaacagcacaagagctgcaggaggtgacctttcctccctttgggagcccacaggccatccgggacggtgtgatcgaggccagcatcaatcacgagaagggctatgttcagtccaaagagatgactgacatctactctacccgcgagcctcagctagccttccaccagcgcatctccttctgcctggacatccacaacatgtctgtcaaggtgaggcgcccgggccgctggttgggctagctgctagctggtgattttgttttttgttttaataggcaaaggggcttttgaaaattattatttagtatgtacagtgttctgcatgcatgcacaccagaagagggcaccagatctcattacagatggttgtgagccaccacgtggttgctgggaattgaactcaggacctctggaaaagcagccagtgctcttaacctctcagccatctctccagcctgctagttcgcatttatgaccctctctcccccagaaccctcagggaagcctggtttgatcagtacccggttcctggcccctgtctaaaaatcactggtgtgcagcagggcttcggggacagagggccctgccaaggctgcatggcccctgccagcagcactgtagtgccttctcctgtagcctggaagaatatcaccaggaggagcaagcaagcatcccaaggttgagggttacctccctgagcccatctctgcctgtgaaacagatggtgaatggctgcttggccagtctgcttagagattgctgggactgagtcactccacactgtggtgtgcttggccaaactcacctgtataaaccatgaggtagcatttagttctgtgcctggacgctgagtttggtgctgttctggccgagtcgtctccttatccaggaacccggttattgctgtcttccgtaaaatctggcaaagtacactgagcagatgtgcaaggccctctgagattaaagaggccctttgtgatctgtcctcacctttaacatctggtagtataagaattcaattctaaactactgccatggcacacgcctttaatctcagcgttctggaggtagaggcaggtggatctctatgagtttgaggccagcctggtctaaatagtaaattccaggccaaccagggctatgtaggtggaggatggatggatggatggatggatggatgggtgggtgnnnnnnnnnnnnnnnnnnnnnnnnnnnnnnnnnnnnnnnnnnnnnnnnnnnnnnnnnnnnnnnnnnnnnnnnnnnnnnnnnnnnnnnnnnnnnnnnnnnncctacaacaaggacctggagtctgcagaggtgagcaagaatgaagggtgggccttttcaaagggaagcagggaaggttgtggagggcagggcagccccctcccttgggtgaagccggcagcccctctctctgcaggaacggcgtgagcgagagcagcaggacttggaatttgccaaggagatggcagaagatgatgatgacagcttcccttgagccagggcctggggaggggtgggctgagtggagactggcttttgtcttttccctcaggggtccctgcgtccctgcccgggaacctggcctcctttcccacacacagctcacagactgcgtatgtgcaggggtcagggatgctgggagctaactatcccccctcttgctactatgtctctgtagctggtgacaatacactgtgggcagagaatgggcggcaggtctcctggaggcagggtcttgcctaatggtggtgtaggcagcaggaggggacagacagaaccgtggattagggtgtggattagggcctggagttgggacatgttgggttgtatgtttttgaagcttcaattatgatttttaaacaataaaaagttctccaaagctccttgtactcgtttgattgcagtgttgacaggcccaggtggctttctctttctaggtgtcatagcccccagtgtgatcaggaaccagcagatctgcagggaagggcatcatagtgagatgaactgaggtcaggaggcccaggtttggggctctcaaacttgggcagattgataagtgtcctaggcttctctgcacctgtcaccaaagaaaagactagactatgggtccttggctcttcaaatcaggaacataagcttccaagagactcaaggtgggtgagcaacagagatggagtcagttggcagagtgcttgcccagcttgcatagaatctgggtttagtcccagctgtgcacaaaccaggcatgatgatgcacacctgttacccatccctgggtcaggttcaagagcaaactgggttatatgagaccctacctcaaaaagagaagagagatgagtggcggcctgtgtgtacaagagagcggagcctggcggggtggggacagtttccccaatggccctatgtgtacaagagagtggagcctggcggggtggtaagtttccccaatggccctgcagaaaacagagttgggggccaggaaggggcacctcagctccccagccaaccctagctgcacatgggtagggacataggcctgcccttgtcaagtatcccagggctgacggcagtgctcactgggtcagtgcagttagcctgtgttcgtggaccactgcacatgtatcttggtccctgctgagctctcttgcctgagacatgtggcgttctacacctggctttccagcatcacttctccaccttgtctgctcagagccacttagtcacgtttctgtgatagggtggttggtggggaagctttgtcttgccagctgtctgtaagctccttaagggctgggcttccagcctcagtggccacccgagtgcccggtatgacatctgggctggttaaagtattgttcgttggggaatgcacactgacacacctcactagcaacgacccagtcaacatgttttggcctttgctttggttcctgatgccagccctggtcacagtgacccagcattgtcaagctaatgccacctcggtgtcatatagctcatgaagttgcttgtgtgagatgggactccctccagctctccacctttgcagatgatcttagccctgagtgcaaattgttcgttggtgctttacatattctatggttttcttttttgagataacgtagcttcgctaggctgggagctggctacacagaacaggctggtcttaaacttccaactagcaaggttgacggaaaaaaaatggttcacagattcaagaacaagagccggaaaatcttggcaaatggaccaactgtaacaataacaaactcagaatcctaaactcaccaagccaggagagggtttccttggatcaggtggtaaccatgagcctgtggtactgggcattaccagaacattaactacaccgggcgttggtggtgcatgcctttactcccagcacttgggaggcagaggcaggtggatctctgagttcgaggccagcctggtctacagtgcgagtgccaggacagccactgttacacagagaaaccctgtttcaagaaaacaaaaacacaacaacaacaacaacaaaacattaactacagccagacgctgagcaggtgagaaagacgtaggctgctgtgcttgctatacacacaggctcagattgtgtgttaacatcaaaaaacacacaagtgcaatttgaagatcatagacaagggggctggagagatggctcactggttaagagcttgttactcctgcaaaagacctagttcataaccatccacaactccagtcccaggggatccagtgttgtcactggtgtatacacatgtacatgaaggcaaagcactcatgcacagtaaatatgaaaaaattttaaactaagctagggatgtagttcagggtagaaccccaggccctggattcaaaattcccagccctgcaagtgagagagagagagagagagagaaagagagagagagagagagagagagagagagagagaaatctgcccaaattgacagcaagagcttgtgcagccaaccctccgtgaactactctggccttcgagcctccctctgtttagctctgctcagcccctccctgtgtggcttgtccaggggaagaggccattgctctttgatcacacacacacacacacacacacaccacacacgatatagcccaggccagcctcaaacttgctacatagctgaggttgaccttgacatctttgtttttattagcatataactatacataacaataggctttgctgtgacatttgcagagtatatataatgtattttgaccatatttgccccttattttcttcctgctcatttcctccctcttccccacaacccgttccctttctattgttattttttggtggtcagtgaatttctttagttttatgggtggttttttgtttggttggttggtttgttttggtttttggttttctttttgttttttgagacagggcttctctgtgtagcccagaacttgctctgtatgtggatctagctggcctcaaactcagagatccacctgcctaaaggagtgcaccaccaccatcgggctccatagggttcttagaataactcagagaacttattagagatatgggcaccttgccaaggctactgaagataaaaatctcttcctccccagtgaccataaactgttgctaaatcccctgggggtacagtgagccccttctcttctctaatggactaccaggtccagtctcatgcaagtgaccattacaacagctgtaagaagccaggcgtcgatccatgcctttaatcccagcactcaggaggcagaggcaggcagatctctgagctggaggccagcctggtctacagagcaagttctaggacagccaggattcttacacagagaaaagagaaactgtcttgaaaaacaaaacaggggttggagagatgactcagaagttaagagcaccggctggcctttcagaggaccagagttcaattcccaacacccacatagcagctcacaaccatctgtaactccagttccaggggatctgacacccttatacagacatacatgcaggcaaaacaccaatgcacataaaataaaaaataatagaaaaacagccgggcgttggtggcgcacacctttaatcccagcacttgggaggcagaggcaggcggatctctctgagtttgagaccagcctggtctccagagtgagttccaggacagcttccaaagctacacagagaaatcctgtctcaaaaaaccaaaaaacaacaacaacaacaacaacaacaacaacaacaacagagattgagagagagagagacagagagagagagagagagagagagaaagagaagaaacaaacaacaacaaaaaaaaaaaaacagtgcaatggccatggccatgtcatttttccaacacagccctttcctccaactctgcattctttctgtcctcttgcacagtgatcgctggcccttgggaaggtgacacagttgtctcactaatggccaagcatccagcagtcacttaactctcagcactttggccagttgtgatacattaccaatgtcccctacaaaaaagaagcttctctgaccgaagctgacggtctatgggcataaaaatcattattttagacagcaactggataagctcaccatgtctagctagtagaacaagatcagtagcttccctactgggtcctatgacttccctgccacagacatcggccatgattccagcactagcctggattcccccctgtagagccagcctcaaacccaatcaggaagccactggttgctcttgcagactcgccactattgcatgctggaggccctaggttcacgctttgcctggccagttggtagtacaacattcagagatcatagccgagtaagacagtggatgacagttctctcagcaacctgcacagctccttcatgcattgtgagctctaagcagcaaggaggaagccatcaggtcagttccagcttgacttctgtgtcttgtgaccagaacctgtgctgtcttcagcgacagagtcttgtctttttttttttttttttttcttttttggttttttgagacagggtttctctgtagctttggaggctgtactggaactagctcttgtagaccaggctggtctcgaactcacagagatccgcctgcctctgcctcccgagtgcttgaattaaaggcgtgtgccaccaccgcccggctagcaacagagtcttaaccactgagctctggttagcaactagcagcagtagcaatttcttcatgttgtgttgaccctccaaccataaagttgttccattccataaaattatgaattttaaaattcataactgtaattttgctattgttatgaattgtaatgtaaatatctgctatgcagggtattaagcatgcagcccttggggatcacaacccacaggttgagaaccactgagcgagtgccaggacaggctccagagctacacacagaaaccctgtcttgaaaaaccaaaaaaaaaaaagagaaaagaatggaaatctcttgccctgtccttccaagcaaagataggtagatgatgtccacgactgtggccaccagagggcaccctagccccaggaatggccccgcccagtcagctatgcctcagcatccagagatgtctgttccttgggccagaaggtggtagtgaactagctcagaaagtgatagcttgagatttgatcagtcaaacaagtggaccctactcctctttaggcagttaacaccctgttggaactgaaacagaggctgggatgtccctccaactctactactcatgactgggcaaggcatttccctccgtggcccagttcacagggttgaaaactcaaagtctcttccagagctaacaccaggacagagttctaggattggagatgcatcttctcctttctcgttccagcctgcgtccactcaagccagatcacttgcttctatggtgtatcgatcttccgggaccctgcatgtcccaggccccgactccagatcccccagactctgctatggttgggtactatgccaggagagtaatgcagggaaacagacaggcaaagtcaggtgggcaaagagccccaaagggtcttgattcattcaaggcagacatccggtttcctttggctgctctgccgggatccaggggtttaaatgaatgagtcatcgtggtgggtattggggagttcccagataatcagcctgggacaggacagcctgaatgctggatcattttgtttttatccaaatgtggagtggacacagacaacaataccctagggtgctgtccagggctcctcctggcactgaagtaagcagccacctgggagctcatgggtacaaaatgagaacaatgggctcttctttctttctcagaatgtttgtccccaggtaaaggtattttaagaatcacaggagaagggtagagggttagggtactggctacctctgcatgtctggcagagggtagagagataagagcaactttgacctggggcctgattcttcccaaggtctgactgagttccctctgtagcctccagggcttcgccagcacttcaacctcgttggactactcagattaaacaccctggagtaattcaggcctgggtgtggctggaggaagagagtttgggggggacaagacgtcaaggaaggagcagagattccccgatttcacaaaactttcgcaaaacagccttttcccaaccccctgcattgtcctgggtgagagaagaaaatttgcataaatcctgggaagttattactaagcctgagttgccccagccacaggtaatttcctcccaggccttgatggggttatgtataaaagccccctggagcaaggccctggcagaacccagagctgaagctcagatcacccagaatcacccagaatcaatccatggctcaaccttctgcccagagccgcaggaagctgatgggtgagcgagcggccctgattacctgccctgggcgtggaagggagggagggaggctggggtggcaagtgtctcaaagctgtacatctgctgccagccctacagctgctgctgtggcacagtgcactctggacaggacaagaggccattcccctggtctctgtcacctctcggccaccacccctgccttggccccggagcttcctgctgaagtccttggagcaagtgaggaagattcagaccaggaactcggagctgctggagcagttggtgagttaggcttggcaggtgtggaggaaaaaagcctgtgtgtgtgtgtgtgggggggcggacacaggagggcaaatgggaagggagcaggctcgggagaaagagcaagggcaatgtttgcctagtgtgcacaagggcctggattccatccccgaaatactcacaaaaccctgaggaagggagcatgggacatgaaggggacatggaagaaaatgaagagaagcagcagtgggaccctctggttgggacagtagcagggtcactgggagtcaggtggacgatggggagacttgggagggagaatcagcctggcccaggtgagtgcccctcagcgtccctctgtctacagtgtgctacttacaagctgtgccacccggaggagctggtgctgctcggccactctctgggcatcccgcaggctcctctcagccgctgctccatccaggccctgcaactggtgagtctttggaaggcaagggggaccaggaggagaatgagaagccctggtattagggctcctggagagaaggagtatcccatcgcatagcctaactgtccttactgtccctgctgtccccagacaaagtgcctgagccaactccacagtggactcttcctctaccaaggcctcctgcaggccctaacaggcatttcccctgagctggcccccaccgtggacatgctacagctggatgttgccaactttgccaccaccatctggcagcaggtgagcttcatctggaggggcagggggtaagagtgggggtagggccacaccagcacccctgggcaccctggaggctctcagtggcctgttgtgtggggagcccgacctctatccctctgcttccttggggtgagaggaattgctgttgatagcaagtcccacagaccagcttatcaactccctacctacagtaaggactgatccctgacttcatctcctccctacagatggaatccctgggggtggctcccactgtgcagcccacccagagcaccctgccaaccttcacctctgccttccagcgccgggcgggaggtgtcctagccgcttcccacctgcagagcttcctggagacagctcattgcaccctgaaccatctggtctaggcctgagcaaagccatttgcagcaggtttatttatctctatttaatatttatgcttatttaaacctactatttaaagacggagaagagaaaacggagctccaagcttctaggcccttctctccactcttgagttttgttctcctgcttgtagcagtgaggacaagctcttgtgtcctcctgtccccagggctggagggagataggtaaataccaagtattgattcctgaggctgctccaggcacccagctctgtggtggttacaaagggccactgtgagccccaccaccccatttcaggggcctcagcagcatcaggaggtctcccttttgggagacaagacaaccctgtttaatatttaaacagccagtgttcccaaactgggttcttcatcccttgctctggtcagccaggtcgcaagtttccctgtctgtccccataggaatgaagggcatggcatgaagcagaggcagccaggtttggtcctggaatttactggattctttttgagggccttgctgggctgggagtgcgagagggcaaaggcaggaggatccgggtggggagggtatggcacagaacgagccctgcctgtctaacctccctctcagccccacttgctcactgtaaccaagcttgaggataataaagtgttttgtatccagtaaatgtctttcttccttcttgggtttggctgatgccttggccaggggctggtgaatgaatgtcaggagaggccagatacaggatgatggtgctgggaggaaggacactccagctcaccctgaccgatctgggagtcactctgtatgtcctgagctacatgacagggacacaagagtgaaaatgcactgtccctgccttgaagccacagcttcttggggaagatggatcatgagtcagtgggagaaagggggcaaagggcaggggaggggacagatgagaggcagccagggcacactgagcatgtgcacaggactggtccctttaccactgtcaacagccttcccaaagctgtccacctaggagaatgacaccgcggcttttataggcagagacctggatcagaactcaagttctgccttggctggctttcccttaatgagctctatctccttgctatcatccttgggagcacttccctgcttggctccgctcctgagctgaagatgtctgcaagggtgggatgtggccatgaagagcacttgcagttgaaagtcagctgcaggctccctgtgggtcagagctgcccaaccaggccaacctaggcaccgtcctccacagccctccataccactggcttctcaaagcccccttgacaatttcccttcccacagcctcacagatccatgtccctggacctgtagagtgtggagaacagagtcctcatcctcatccctccaacaatcttctggaacacacagtgaactctgggccagagggtggagtgtgactaaagagcaagccatcctgccctgcacagcacagtacagggctttcacagacctttccactttcagtgggggcctgtgaaaaacgagcctggccttccacacctcctcccccaccacaggactgtgcccttccctggccacagcacaagagacttgcagggaaaagatactgtccccagtcatccagcaaagctaccaacagcattcaatagctacaaggatctttatttacaaacaaagcaagagggactccccctcctgagttataaaaataaacttatatatacactgtggccctataaagtccctccttggagttcagctactgcaagaattggggcaaccatcgggaccactcgcagtctttgggtactggtggaaaggacagaaaaccacagaaggaacgggcatagtaagtagagggcaggagtgggtgagggcctcagactggagaagcatccttgcaccactggatggggcagcctgggctcatcctcactccccctgctgggatgctggggctgggaccccgtccaggctactccaagctcctcagagtgcagcgatggctttggcagccacttgccgaccgaggggcagggtgaggtctgtgatggccagcactaccttggggctggacatagcagacacctttactagttccgacacagtggcaaagggcatgaactgcagaatgctgcccctgctgtcctgctccaggcagtcgacacactcctccatgaaccactgcacaaactgggtgtgggggccggcggtgcgggagcccaggatggaggaaatgagcaggaacaggttggctgtgcagaagggaacaagacagcagagctctagaacaagtcagacgagaaagaaggggaccgaggagggaaaggaagaggcagtgagagctcacataggaaggccagggagggaaggtggggcgggggatgggggatggagtaaagggaggctgttagcggccggtaagggaacaggacagcacatggaagcggaacaggatgtcagggcccagaggatccctctggcaggcgtggccctgcctctgacgaggaggggcccgtgtagctcagtctgcaggtaggcacggctgggaggactcacccaggactctgttcagagggtccctcatgttgactgtgtggagttgggaagccgagagggagctgttcatggaacggtcagctgtggagtggcagagagggtgctgcgtaagctctgactctaggggagccttacctgtcccctgccatcaggggagtctggcacgtacggggcacagaagagcctgaatctggagagtagatgagtgggaacaagcctctgcgcaccaaccgaggctaaccctggcactctgtgtggctgaagccacctgtcccactcaaagcccattttacagacgtacaatctgtttgcttagagcctggctaaggtcagaggtggtctgccagcagctttctttcacacaaggctgtggctgtggcctggtcccttataaggctacagagaaaacttctaggctcagaagagatctctggaaacaggaaacttggatgccacacaaaaaacttttggcagaaggaaaggatgacatgggctgccctctggataggaaggcaggagtgcagccccaggtcgcagcctgacagggcctgttctcagccacagggcatgtctctgggttagaaggatggcagagtgagtgagtgaatggtacaagctgtaccaaggtagtgaactcactgggtgtcttgtcatctttcaactggtgacaagagagggataactgtgggactgggagggcccctggaggagaacttcaggtccccaccagcaggcagcagagcatccactagggacagacgtggaagctgctgccacaccacactggctgacagccatcagctgggagccaaggcaggtccttagggacaaatggtcctagcaagcccgtgacctcccaagtgctcactgggactcgacagaatgttggcatcatcctcattggtgctcaggagtcgcatcagcttcgaaggctgcatgtcttccacggggaagaggctgatatagtcctgggggcaggagtcactgtcacacacccaacctcccaagtctccaaggactggagacggctggaggtgagatctgagtggagaggagtgagtttcctagtccctggccagcatccccagtggtggcccttcccacactccaatctctgccctagtgggcagaaaggaccctcatcaaggatactcaggggccactcaagccactcccccagaccctgaccaatcaaaaaggcccacacacaggggacctcaaccccacccccaccctgggaaggcagctctctgctctaagtgatcaggaagcatctcatgaataaacacacaaccaaggcggtggcagacctacctcaatgtcttccctgtgtctcttcttgtggcgggaagctgcctgtcccttttgagaggaataagaactcagggcgcaccacacagctagtctggtgaagggttccaagaaaaaagaatagttaagagagtcccaaaagaggctatgtgtgctcatgctgaacaagcccctcccacccaccaccactcagcgggccccccaaccacagcctggcttcctgagctggcaccagggctggggtgcctgaatctgggtggtagatgcttgggactcaaggggagcagacaccaggaaggctctggagagaatcctacttggctagtgcagtgccaggagggtccatgaggctgtgccacttggaggagtcagtaagcagaccgggcaggatgtggcccagcaagaccagggtcacctgcggcaagtccaggcagaagatggagtagagtagctgtactgccctcagtgtgtgttccttgcgagtctccttcagcagctcctgggcagtgggcaagcagcggctaaggcactgcacacctgggccctagggctctcatgctccagccactctacagtcaaaggtgctatccaactccaaccgaaggtgcttctctgaggtgaggtccctacctctgtctcccccggagaccacccagcttccagcaacctcccaaagaagcctggcctaccccaactgaggacacccatggccccaatctacatagctgtccacatccaccctggccccagtaccttaatcaggttgttgcagaaccagtagacgccgcccatgcgcagcagggtgtctaggatatggatggagcggctgtccacccagcccctctccagcaccttggcaaagatgtctgtcagtacctccttgatggggcgcttgggaggaagcaggttccagtagggcattgtgtccacgcccgtggatggaaacttgatctgtgttgctgtctgctgaagcacgtccgcacacatgtgttccaagattgagttcataatcaccactctgggggcaaggaggatacatgcaggcattacccctggaattaggttacggaaacgtggctggggaattagacccactgcacactaggggaggacacgatacaaccactactgacaaggagcttacgtgctccgcatgaagcctagaaaggcacagggcagagatttttctcttgcaagttccatcaatatattcagattttctgttctccctctcccgctccagcctctcccatcccccaggactgagctctgccaaatcagggtcataaataaatacaatcacttcccactgagtactgggggtggggggatgtccccgcccagccttggcctcctcccaaagtaaactgtaacttccagaagaggcccttgggcagcccccaggactcttcccagccttgggtagctgggcaaagtgttcacagccaggaaccctctcaggaacatctggggctatgaaagcagtggggatcggggcacagggatgctgctgctactttcagagctcctctccacctgcacaggaggctctggatttccactgtgcccgtgtacgtgtatgtgtgagtacatatgcatgcatgtgcgcaagcacacatacacacatacgtacacatgtacacacacacacacacacacacacacttgagatggatggtgtcaaagcaaattttctatagcaaggggagagcagatgtgctcttacagacccttccccaaacggtttcagctgtcgctcagaaaacatcctagcagctgccttgtgagctgccctcagcacccactcagagcagtgttcccccagtgcctctcaagggcaggatggtagtcagaaagggcacatacgggcttaaaaagaaaagatatcactgggcggtggtggcgcacacctttaatcccagcactggggaggcagaggcagaagcatctctgattttgaggccagtcagggctacagaaaaaccctgtctccaaaaaaaaaaaaaaaagaaggaaggaaatcctgtcacatgctggaatatgagtgaattttgaggaaattatgctgagtaaagtcatgagaaggcagatattacgtaattctagttatatgaagtatctaagcgtagccaaactctgggacaggatacagcatggtagctgccaggaactgagagaagggaaggtggacaatgtttgttgggtaaaaggcccagatatacaagatgaaaaatgcctggagggctgtttcacaacagatcccatatactgaatgacacatataaacacagctgaaatggtaaattgcctattacatgcttcttgccacattaaaaaccaacagtcaaacaacttgacagtggagtgaatgaagcgactggactcagcctagtggaagtccctgaagagccaggacttgaattggtgaccaggacagctgggggtgggggaaggaagccataaaagctgcagatggctcagagttcctcgacagtgacacagccaagccagctaatccctttgctcttctacctcagctcgttttctggaatttggagcctggaggacagatgtcaagctgtttggggtcgatatttcctgcctatgggaggtgcaggattaatacacagagactcacaccaaattcctgccgagccagttgaatgaatgggtgaataagaatgtgagggagtggtaggaaaggggaaaaggtgggtgatagtccagctactctgaatgtgcaccccctcagctgccagggcagactggtcagaacctagatggaaggggaagtggcttagtgagcggctacctgggaaggtggaggccgagagagagcatcagagtgggatgcctgtgtccctggagggctgactcctcaccacacggctgcaggggaggggcgggaagggcagggcaggttactgacctctcattgtagaactgcagggtgttctcactgtacagtggccctgccagctgacggatcatctgcagcgacttctcacgctcatccagccccagcatccggacgtgggccacaagccaagccacagcgcacactgccagactgcatacctttcccttgatattgtcagtgatcttctgtggggagcagaagagagcgacttagggactctttgcctccccttagccatcactcccatggcgtctgggagagctggggatcacattctatacctctgtaacacaaatttgattttctcaaagataactgagaaggaggaagtggctaagacaaggattctaagactaataccaaaacatgatctcgggctttaggatttgcttgaatgcaaactaacaagctctcgatgactggccctgtgtctcaggcagagggaggcccaggtacaaatgcagctacctggatggactcgaaggccagcaccccattctcccaggcattgaggatctccaaaatggctgctgagatgctcaggcaggcttcatgccacttcatctgtctacagagagggaaagtgataggaggagcatcactacaaaggagctggagacaggatgtggggagggggtcttggaatgcccccacgactaccccaagggcaggacctaggccactaacactagcttcatctcagaggagttgttgagcaaggccaccaaggactctactttggtggagtcaggccggaagcaagggtggtcagggttcaaaatcttgccctcctcaggcatgcaggtctgcatccaggtctcaaagaaggggacctcctctcctgagcttgcctcggagagaatcacctggataagacagagaggcaccagctgagagaggacggtatggcatctgtcagagctgagcctgggactgggcctcagttccctgctcttttgctgttccctttccaaggacaaatgtgtgcaggggaggcagacagggatctgtgctgccacctagtggtcagtgtgaatatgtcactagaggacctgtaatgctggggacccactgacatagcaggcaccagaattcaggccaacagaacctgctggcttgggagagcaatggggccccattcagttggtgcctcttaatggcaccagctctcatttcactcacctctgagccataggtctgggccacgtggcacagcatgaggaaggagatgtcgaagagcaaggcacgaacagaggctgtttttgctgtgggaaaggcaagaatgccaacctctcagcccaggacaagggcccaagctctgtacaggagaggaggtgctggggaccgaaggcctcatgcagagtaggcaagcatggaggctacatgccagctcaggatttcctgaaggaaggtcagggcccagtgggtgcttcaaagctctaaggctcagaatccttttcttgggtcttacttagaacatcatcccttccttggaaaccaagacctccagaacccaaaccattctgaaatggtacaggtggagaggtggggggtggttgtggcagactaagcaaaggcagcctctccctcccctccctccctcagtgcagatgggatctgcagatgcacacaaacttactgctctctccactgccatgggtagtgaactcattcagactgcaggaggaacagagaaacaggtggcatcaacctgggcatgagctgagctgagcgacagaagtgggggtggaaggtgctacacattcagagggtggtcactagagcctgaactacaggctaaatataaaaagtgtattaattgccaccattatggtggctcacatctataatcccagcactgaagaggctacaacatggagcgtttgagggcagcttgagccacacagtgagacccctgttacaaaagatttgtaagatgcccagaatggacccacgctccacatgtcaagctccaggttaccctcttcaaagcatagaatttaagaacccttattagccgggcggtggtagcacacacctttaatccaagcactcaggaggcagaggcagaggcagaggcagagacagagacagaggcaggcagatctctgtgagttccaggtcagcctggtgtacagagttacaggacagcaagggctacacagtgagacccatctcaaaacaaaaccaaattgaccagagtggtggcacgggcctttaatactagtactcaggaggcagaggcaggtggatctctgtgagttcgaggccagcctggtctacaaagtgagttccaggacagccaaagctgttacacagaggacccctatctcagaaaaagggagagagagagagaaaaaaaaaaaagggttctgcagaggccagaagagggtattggatcccctgtgactggagtcacagatggttgtgagctatcatatgggttctgggaactgaacctaggttctctacaagagcagccactgagccacctctgcagcctgatgcctcattaccttatcaaccatctttatttctagctagcatgctctgccctggcctgtatacctcaggggagaccaatacccaggtacccctcccatccacatcagggtacagctctcctcacttgatgaatttccgggcaaaggacttaagcttcccagtggcagcagcggcagccagcagcaagtccaggctcttcccggacagcatgtgtcccaggacccccagcagtccctctggggacttggagtggtctgcatccatcgtctgcgaacaggacaggaactcagtgaaggacactgaagaaccccagacatagcccaaccacatgttctctctgtttgtgtccactgactggtacaccgcaccttcagatgtatactgtcacttcttgacgccaacagaaagaacactgctgaagatacacctcactcttagagctctgtgctcaactacactggtgtggtgggtgggggtggggtgagtaaggatctggctggcaacttcccttctgtgtcttcacggggtggtgtctgtagagtcaccaaccaacagtggaagggcaactaatgccagctctcagtggcctccctccctttccactcccaaaacaggacggcatggaagccaaagagcagaggggtctgtgggcccggtttatttaagggaagtagagaaaagctgaagcccacagcagcacaggcaggcagcatgtacttaccttgagaatgtttgtgacggtgggctctgcccggaggatcagcccagggttaggctggatgttggcattttctgatgattttagctgggggtcccgatctgttgtgctatggccacaaccccaagaagaaaacagaaacaaagaggattcttatttttctggagacagatctcatactgtcacccaagctggcctcaagctcaaggtaatcctcctgcttcagcctctcaaggctaagattacaggtgtgagctaccgtatgcggctaaggaaaacacactgatacattctctaacccactgggtgtggtggcttgcacctttactcttaagccacttaagtgtgcatttgaagccagccagagctacatagtgagactgttttttattttaactttattttatgtgcattagtgtgaaggtgtcagatcccccagaactggagttagctgtcatgtggatgctaggaattgaacctgggtcctctgaaagagcagtcagtgcttttaaccactgagccatctctccaggccccaagactgttttttaagaaaaaaattctcttatccaattgctgaaacaaaagcagagaggagatggaagcacacaggaaactctggggctggaggtgcaactcagtcatccagcatttctctcccatacactggtttcactggcatggcaaaaaacaaagaagctttcgagttgggataaagtttatgactgaaagtgtacctgatatcaaaatcatttcaattcgtcattatcattatgcccattttgaaagtacatttaagatgaaagggagattaaggctttctcttcatcctttgcttgcaaacgagggtgtatcagagagcagcagctcagactatgaaactctgctctgccggccctgttccctggacctgaggacggtctcagtcacttgctactcagacttcaaagaggaagggaaaggcacccgaaaccagtctggcaagagagagggagatcaaggggcccctaaggcagcccaagggggctcataacataccgcttgcccacaagactggcaaaattgacttcagacagaagtccctgcttgttgcattcttggaggaggaaatttgtgcagtcacaactgtgaaggaaagccaggggatgggagtgagcagagagctgggaacgaggagtgtctgtccagtctcttccctccttcaggccaaggaaaacttgagtacccacaggtagagggttctgggtacttggcaaatgtgagcctgcttcctcccacccttgctaaaagggtccatcagggagacagctccctgcaactcatctgagacagagagcagggaaggactcagaacaccttccagtaaagcaggtgtggggtgtgggttatgtgtagggttggggttggggctcgtacttgcagcgctggtcagctttgtccaacaagggcgtgagcttcaacaggaactcaaaagcagagttgacatcctcagtgaagtcctacaaagaatcagaaactctcacctgggttctatgtcctccagggccccacagcctgagtgcaagttcacaaggacaccttgctcagtaaaacagaaaatagcctgtgaccaccactagcccccagtaaccaggtggggagatggtgggcaccacactctccaatcactgtaggtgatcttgccagttggggtggagaggagtcagcacaagccaccacaggagtctaggccaagtgtaaggatgaacatgggtgttcacaggtacacaaaaccttcctctggcacaatacactgcccctcagctgcagcctaaatgacccaccctcagccgggtggtggtggcgcacgcctttaatcccagcactcgggaggcagaggcaggaggatctctgtgagttcaaggccagcctggtctacaaatcgagttccaggacaaccagtgctacacagagaaaccctgtcttgaaatatcaagaagaaaagagggagagaaagaaggaaggggaggagagagagagagagagagagagagagagagagagagagagagagagagagagagagtcccgcttgcgtttgctcgccctcatctcagtctctaacttaccttttctccatgtaggtgtttcttcaacttcaccaaaacctgtgggatctagggcgtgagagagacgagggacatgaatgtcctttctctctcacttaccacagaacatgtcccattccctgctgagggcacagaaggagaagtacctacagcgagcgacagtgtggagcatacccgggagcccacggggacccaagcactgccacctcttagcatacaggacatggggcctcccacttctgccacctcaacaaggaaagatgtcgctttagaggtgacagggctgcttccctggctctcttagctgccctaacctaatctggttaaggatgagctggacaaacagcagagtcccaagtagctaaaccagcagagacacgaagaaaatgaccaaatggagcttgtgctggagactcagcaggttggactgaatgccaggagggggacacacgggcaaaggtccagcatgctgccacttgtctcggtcgcttccatgacaccaagtaccttgagataggtgaaagccgtccacttcagctcctgagtaccttcaggggactcaatgagtcccacaaagcaggctttccagatttccaggacaaaaaggggggtggggatatgctgtggagagtccaagaaggaggtgtgaggggctgcccagatcccagctacactccactaagaaatcgagaggaaatctattcttctcaagtaccaggctcctccctcttccctaaatggccaccaccttgcttggccacacctacctgcatacgcttcaccatcatcagctgctccaccaagggctgcatctctcctgtcaggttcatggtgccctcaagcaagatcagtgcatggacggtggggaagccagtcttgtgcagctgctctgagtgcacggacagcatcgtggggatactgagaagtcagacatgcggggacagcttaggaactgaagagacggtggaagaacagaccacataccccatcttcccatcgcctccagaatcctaaccttctgataagtgtgtcacactgctcagcctggctccggagctgggggttgctgagattggccaggatctccccgagctttaaaagacagtgctcaatggcggtccaggaggctggtggagaagaaacaaggcagaaacatgcttggaaggagaggcagggcatggccccaaactcctcgactgtggccttccctgggcccatgaaaccgcgcagcaaggctttctctgaagaggatgtggagaccgggtcctgagggcagcatgcactgtttctatcaggggaacaggcagcaggggacagagcaccctagaaaccacaccaagggcctgacttccagggactctacacaactgactggagacaaacaagaaattgatgtagagtccagtggccaggcagggacagagagtgtgagtaggccaccccagaaggctagcctcgcagcatcgatcacttttgctctagggaagctagctctaaacaccttgccaacatagcttgagtttctgctctcttaacagcttgcccaaatggtctagcccactgacctcactcttaaatgcccgcactcatggcccatagcacacacttactgcttaattactagtcacttatcctagttacaattccaaaggccaaatgacaaatgatggcaccagctagccaattaacctccatgtagcacaaaggtaagaaaaagacaaccaagacctgagagccattaagattaagtattcatctacttttctaccaataaacatttatcaagtgctcaaggcaaggcactgccaacactagcaagaaaacagatgaagaaaaactgtcagtgcagtccattttgacacagtgatcactcactctctttctggacttgccccagatgaagcaatttggagaagtaaatagagactaatcccctaacaagctctccaactgagccttgaagacacaggtgtcacccactgcagcatccatgtaaatggaaaacaagagaccctcaggtggctgtagccactggggctcaagcaagactgtggccttgggcctccactgccggaagacttccctcccatagatcagcctgttctcaggctctggaagattccaacacttaacatcagaactggagttaagagataacagcacacagtcctgacagacaggcactgagtttaacccaatgttcctggtcacatctgagtcacttgcttctagaggagtaacgtggagatagaccagagcgggcgatgtgcctgtctcgtccttgaatttcctccaggtgcatggtattcgagtcctactccccaccagtgtataagcttgctgagggcagggaccctgccacatgctcctttggtagccccctccccccctccagcaactggcacagtgctgggcacacaagaatgctcagtaaatacctgttggttgattggctcgggtgccaccctgcccaagtccctgggatgtatgcaatgcttatggggagagaaaaaaggaagtgggatgatttcggatccttctagaaagaagtggatggcatcctgcctctcccctctcagtcaaaggaccagccacagaagcagcagcaggcagggcgtgggggagtcaggggacgtacaggcctcctctagtttggcgatatgtagcagagctcggtttttggtgctgctgagagtcttctccaggcactgcaggcacaaggcaagctgcttctccccggtggctggagtgccagcttccaatccttcctggagccgctctgcagaagctgctgtacaacgcagcagccagtggagggcgctaagaagcgctcggcacagccccatgcactcctctgctttgccgtggcaactacccagaaaggatgaaaatttgtatctgttccaaaagctgaaatccaacccacaccaatgttcccccagagtctctggcacccccctactaagggatagagttgggaaattggcaggatcctagtccagccagcttccactagacaagattttcaacctgctcttccaaagacagaagtggcactttgtcttaagggaatagctagggaagctggggtgggcaggtggacgggaaaaacaggggaacccacaggtggtctcagtctgtttcctggactatgggcttttcttcagcactgaaagaatgatggaatattctcacttcctcacccatctcttacctgagtcggtcacaaaacatgtccatgatatccagcaaagcctggacacacaggtcccgggaaaagtcatcaaactggggaaagaacaatggggaggctacaacactgcctagtcaacagctgtgagcaggtctactcctcctccctccagctgtgggttgcagacatcctctgcacatggaaatgtgttcctaattcccaggacctcctccctccaggggaagtctacaatgctaaacagaggcatcaatgctgcttgtcatgcctcagggtacatatgaccagagtggccaaggtggtaggccttgtctgtcactctgggacctctgttccctcccacagctcctcaatggccatggtcataccttgctgatagctgtgagcacagaggagtaggacaccatctagaaggaagagacaggacagtcagactaggcatttacttgagaggggcaaacactgatgcttaacttgccacagctctgaatccccaagcccttcaagaggcttccccagctcattaaaagacacacaataatgctgtgtgctgtccttgtccctgcttctatcagacccactgcaaacggcatctgtataagctaactgagaggactttcatgtactcgaaggtactctgttttgtctttttaggctgttccttgccaaaaataaataaggtctagttggccactagtgggcagaaaagtcacctagagtgaaggcaatgttgctttatttctataaccttttcgtgtaggaggaggggaccaactcagccttatgtcagctaggcagagatgacaagtgtgattctgctgaaccgaaaactcacttcagtggtcagtgccagcctaaagtcagtccgaacacagagatgggtgtgtgcgcatgggtacaggttctccgcactaactagacccattgcttcttctgtcaagactgagggtgcagctgagcagtaaagcgccttggaatacttgcctaggtgagctcctgcaccagaaaaacaacacacaccagtgaccttgaaggccacagtaacagtctacttgggaggctaagacttgagaaccacagaacctctaagcgtggtatcagtctgaacatcatagcaaaaccttaagtcaacaaaaacgggcatgtgtgatcttatctgggtaagaaggagtgacagatatctttaatcctgaacaggagaagcaagctactgccttcactcctcactccatcaggggtcacttcattcagcgattgccacaatcctgatgtttgcagaatgactaaattaaaacagatccttaaattagcacttcccaaagctgctgccaaagctacactaacaaaagttaaatcaaatggcagacacctgcaaagccagcactcaggaggactgctgtaaaggtcagagccagcctgggctacacagtaaataccaagccaggctaggctacagagtgagttccaggacagccagagacacacagaaaacaaacagaacacataaatacatacatcctcattgtaagactgctcaaagtcataatgtatttataaacaatgagatgactcagtgggtaaaggctcttcctgtcaaacctgatgacctgagttcaatccccaggacccacagctgaaagaactgacccccaccaacctccacacacgcaccctagcacacatatcctacttcccagaggtgcacaagcaacagtcttcaaagagatttcatcatgagatctcatttagctagcatttccaaaatatatttttagaaattctgcctggacagtaaattccttgtggaaagagatgatactaaattcatatctgtttccgtagctccaaaccttgggccttgtctccaggaagctttcattgcttcaggtaactgaatgctattaatgagatgcaatctgaaaaatttttaccttgcaacatatttctgttagtaaaatacattcaccaccataaagaaccagtttgaaagaaatcatttgttctggttgagagcatatagctcagtggttgaatgcttgcccagcaaacacacagccctgggttcaatactcagcagtgtgaataacaacaataaccatgtgtttgcagagcatgggccagatctggtgtgtccatcatctggacagactgggccagacatcttaaaccagaactcatggatgaacagggacaaaatacagacaattagcagtcagagccatcagtaacaggacatactgtgaagccaaaacaagtgtctgacggtgatcagaaagttgggaatctgcctgggcagaatgaccgagccgttccaggctagtgtttgtttatttataacaggcgtccccatagagagagcttggagaactgaatcgtgctggatgccaacctgtagggggagctggatgtttcaacttaaaaaaaaaaataaaaaaaacccaagccccacaccaaggagagagacccccagctatgtaatgtattatgctcttaacaaggccattagtcaaaatgaattaatggctttcagatgatgaattctgtacctttcttctaaatataacagttaagtgctgctttagacacacctgaaagcactaaccactggtgacctgtttctcccagcaggacttaagtctgttccagtcttaaacaattctaccaactagacactcacacggagctgacacaagacctcgaggctagaggctggagtagcggtctgctcacgtagccagcccaggctgaccttgcagctgtctaatcctcttgctcctcttcatactcaacacccccaaccactcctaagtgccctctccaggctcagcaccagaccaaagaggctcttaactctgggggaagaataaattactaactttgcatagcactcgacaggccatgaaggtctttcacgtacattctccttcagcctttctcgtcatcgtttattatatatacatcttaagagtcttctattttagagagagcttcccacagacctcgtatttccatttaaccaccctctctctctcttctcctcagacacgagtctctacctccgcagcctccgcttgctcttcatgctgcaatcactcctgtcctgaccccctgcattgatcttttcatcacagccatcaacaaacccttgctgttaaacccatgggctctcactttcgatggaacccagcttcctggcagcaggtgacatcatcaaacacatccttgactttcaaccttcccttttcttattatcttaaatgctcttgatggtttcttctctactctcttgagattgtttcttacatgtgctcttgacatatgattaggtgctcaggaatttggcatggaccacttctctgttgcccacattccctgagcaatgtcatccatgacaacatcctccattgccatctgagtctgaggacttgttaggatttgcccccacagatgaatgtgtggaagggttggcttccaagcagtagatataaccctgagagctgactggattaatcaatacatggactcaaactgatggcactactggaaggcagtgggaacttccagaggtggggcctagttggaggaagagaggcacgtttttgagaggctgtatctcgttcccagcctcctcttcctctgcttttctttgcttcctcgctaccaggatgtgagcaactttatccctgtgcatccttctagcatgctatcagccacatcactgcctagaaacaacaaagctggccagtcatcgcccaaacaaacccttctttccttaggtggcttagctccagaattttgtcacaaaagaaaatgactatacatttctaaaccaacagctacatgtagactgagttctaggcataaatgctacctccttctgactgtctcctcggacagtccacaccagcaccacgaatgcaacaaggctggaatcatctgctgccctcacttacatcccaaccctaaggactacaccactctggttctttctccttttgatgctatctatcagttatcaagtgtccagaccagagatccaggcttcacctctgacctcttcccttactccccttacctagttaaattagcaaaccctctcaatacgacctcctaagccaatggttctcaacgttcctcatgctacaaccctttaatacagttcctcatgttgtggtgatcccccaacaataaaattatttcattcctacttcataactataagtttgaccctgttatgaattgtaaatatctgatatgtagcatatctgatactcatcccctgttgggttgctgggagtttccaggtccacacacccccaggcttgtctcagctttaacccacgacaatccccaagaggtcatgacccatagggtgagtcctaaactgctcttgaactcttcatctgctgcaattttctttttcgttttcttttttttaaaaaaagatttttatttatttatttattatgtttacaacattctgcttccatgtatatctgcacaccagaagagggcaccagatctcataacggatggctgtgagccaccatgtggttgctgggaattgaactcaggacctctggaagagcagccagtgctcttaactgctgagccatctctccagcccatctgctgctattttctaagtacatgttggtatcacctctcacctgaattactcgactggcttaagtcaggaactggaaaactacatcttacaaaccaaatctgcctcctcacttacatactgcctctttctgctttcaagctgtagaaacagaacagtggcatcagagcacaaagaggcctgcaaaagcgaaatggttaatctagtccttaataagaacaacaagaacagacaaaacgaccagaggaaacaggctccctgcttattgccttgattcccttccacttgtccatcaagctgcaaccagagtggttcttctagaattaacacataaatttgaaactaaaatttgtaagttgacatgcctgaaaatagccaagaacttttttttaaagactgttttttattagtgtgtgtgtgcacgagctcgtactatgtgtggtatgggggcccatggaggccagaagagggcattggatctgagggtagagctggagttagaagaaattgtgactcactagacaggggcactgggaaccaaacttgggtcctttggaagagctatgagtactcttataactgatgaaacactctctaatctcaagtcatgagggtttttgttttgttttgttttgttttttagatttatttattatgtatacagtgttctgtctgcatgtatgccagaagacagcaccagatctcatgcagatggttttgagccacccatgtggttgctgggaattgaactcaggatctctgaagaagagacagtgctcttaaccgctgagccatttctccagaccctcaagtcatgagtttctgaaaaatgagaacccttggttggcacagtgctgacctaatgaacataaagacctgggttcaatcccagttcataaagctcagcaaagaggcttctgcctgaaatctcagcacttaggtaggggacaacacagtaagttcaaagcctggtacacattcaactccatctaaaaaaacaagaagaggaaaaaacaaaaacaaaaacaaataaggaaaaaaaaaaaacctaaaggagttttacccaggtattatatacagtctatattatatataggccagacatggtggtgtatatctgtaatcctagcactctccaagtccagataggaggatgaggcatttaaaatccacctaggtaatatagtcaggataagtgctaattgcacaccttgaatctcagcactcacacctgagaggcagaggcaagcaggatgaggcatttaaaatccacctaggtaatatagtcaggataagtgctaattgcacaccttgaatctcagcactcacacctgagaggcagaggcaagcagatctttgagtttgaggccagcctggtctacagagagagttccaggacagccagggccacacagagaaacctcgtctcaaataaataaataaataaacctaaaaaacaaataaaaacccaaaaccaaccaaccaaacatataaacaaaagaaagacaacagaacaaaccatagtaatcaaaacagtaggtagtgctaagggctgggcaggtcaggattagaacacttccctaacatattcaaggccttgggtttgattcccagaataacaaatatgacaaacaacaaaacagtaaagcacttgtgcaaaaaagaacaaatacatcaggctttgtctataagtgaagccatgacaaaggatggcctatttaataaaggtagctgagacaactgctcatctacttgagaaaataaacataaatgatttttaaaaagaaataaaagggctggagagatggctcagaggttaagagcactggctgctcttccaaaggtcctgagttcaattcctagcaaccacatggtggctctcaaccatctataatgggatctgataccctcttctggcctgcatgtatgcaagcaggtggaacattgtatatataacaaataaataaatctttaaaaaatttaaaatataaaaattaaaaaaaaatctagcctgatctccagagcgagtgccaggataggctccaaagctacacagagaaactctgtctcaaaaaaccaaaaataaataaataagaaagaaagattaagagacctaacttcctcacactcgaaaatctgcctgtctctgcctcccaagtgctgggactaaaagtctgtaccaccaccgtccagccagaaatgacagtttgggtttttttattttattttgttttttgttttttgagacagggtttctctgtggctttggaggctgtcctggaactagctcttgtagaccaggctggtctcgaactcacagagatctgcctacctcagcgtcccaagtgctaggattagaggagtacaccaccaccacccagggaaaggacagtttttaagtctctatcctagaggtattttcacacatatgcaggtaaatgtgctgaagggtttccatgacacaatgattactgtggtagaaacaaattataagcaatttaagttacagtaaacgggaacattgcacaacagtttaaaagagcaggatgtggggaaactacagttaagttccaagtgctaacagtaggcagactgctgggggaaagagaagtgccaacaatggcattcccagatgaggaacctactcccattcagcattcctaacaccatcacataccaaagggttacatttcatggaatccaaacctggcaaatttgttgacagaagtgatttggtagctgtgggaaaggagacagaataaaaagtgaagggaaagtctccaggagaatggaaatgtcttacctgttgctacattttggacgttggtgacatgaatatacagaattgctaataaattaataagtaatgtggggttggtagggggggatggaaggagggaagggagagggaactgggattggtatgtaaataagattgtttttaatttaaataaaaagtaatttaaaaggaaataaataatcactgaatatctgggctttttagggctggggtgaggctcaatgttagactccttgtttacatggacaaggccctgggttccatcctcagagcccaccctaagaacatacacataatctgtgcatcttgtcctaattttacacatttacatatacacacacatacaaatttttttcctcatgtgtgtatggtgtgtgtgcatagacatatgtgtgtttctatgtgttctagtatccatgcatttatgggcacatgcatgtggaggcctgagattgaggtcttattccttgatgcagggtctttctactgaatacagaactcaccgataaggttcaactagcgggcctattattagctcaggacatctcacttctgccctccaagcactggaatgacaggcaggctgccctgctcacccagcatttacttaggttctggggatctgcactccagtcctcatacttctttacccacaaggcactctctctctctgccaacaagaatcttatcacactatgtcccctcctaaaactctgtacgcgctgactagtcattgtggcataatacatactcctcacattatcacaggtcctttataatctgtccttgacttctcgaaaccactttcttaaatcaggtgtcacagtcacttgtacttgtaatctccaaatttgggagggtgaggcagaaggattgccatgaactgaactaaagagaccctgtctcaaaaacaaacaacaaacaaaaaacttgacaacccaaaagttgaaatacaccactctacttgaagtcctagccagcagatctcatggtatgatccatggagcccttaaggtctccaacaacttttcagagggtgttgaagccccagttaaaataaggctgagaggttggctcagcaggtaaagattcctgctgccaagcctgatgacctgagtttgatacccaggacccacatggtggaaggaaataatcaattcccaaaagctgtcctctgacttacatgtgtacacacacacacacacacacacacacacacacacacacacacacacacacacacaaacacacacaccttctagctcacaatttctcacagctgtgcagtagagtgtcccacagattcaatatgtaatgatacagtatagttaaatgtggcaacaactagactatctgtataactcagttacacagttccaaaagaatcatttcatgatgttgcaaaaatcatacaatgctccaaaactgtaatacatacctgtaatctagcacatgaggctagagaattagtaatttgaggtcaacctagactacacagggagactgtctcaaaacaaacaattatgcattggtaaaatatcagctcaagccaggtgttggtggcacacgcctttaatccagcacttgggaggcagaggcaggcggatctctgtgagttcgaggccagcctggtctccagagcgagtgccaggacaggctccaaagctgcacagagaaaccctgtctcgaaaaaccaaaaaaaaaaaagatcagctcaaagtacaaagggcaactgggggtttatccaggcggtagagcacttacctagtgcatgtagctcctgggcttgatcccagcacaagaaaagtgcaagagaggccaatggatttgaatgtaactttgtacaaagtcatcaatgacaggggtcttagtacctgctaaagtttagtatagtaacaaagaataaacctaggtgtgatggtgcatgcctttaatcccagcacttggaaagcagaggcaggaggatctctgatttgaggccagcctggtctacacagtgagtttcaggacagccagagctttatggagaggccttgtcttggaaaacaaacaagcaaaaaacaaaagttaacaaaaaatatccacctatctaaaaagcttattaaaatatctctcctgtgctggcagaagggtttggtgagtatgtgtgcttgcggcacatgaccgatgaccaaacctgagttccattcttagaattcatggtgaaaggaaaaaaaaaaaatcaactcctgaaggttgccttctgactgtcatacagctgcaatgttacatatacatgcccacactcacacatctatatacaaacaacaccaataaataaaagttaaatttattttgaaaatatttcctccttgctggtcattggtggtgcatgcctttaatcccagcacttggttaacaaaaacaggcagatttctgagtttgaggccagcctagtctactgagtgagttcctgggcagccagggcaaaacagagaaaccctatcgtagaaaaaaaaattcttccttttcaatcaaatgtttgacatgtcatgtgaggtcagatttttgttatatgtcaagaaagacaaccttattacaaagactgaatgtagaagcagaagagactttagcagtctttatttattttttttttaatggttttttaagacaggatttctctctgtcatagtcctagaactcactttgtagaccaggctcgccttgaactcactgagatctgcctgcctctgcctcccaagtgctgggattaaaggtatgtcgggccttttaatgttatcttaaaatttatatctctctctctgagggtgacctcaaactcattgtgtatccacagataaccttgaacttctgaccttcttccctctgcttataaagctctggggctgcaggtacttggtgccaggaccttggtgcatgcctttaatctcagagtttgagacagaagcagtcagatttcctgtgggttcaaggtcagcctagtttacacagtgagtttgaagccagccatggctacatagagaaaccctgcctcaaaaataaacaataaacatcgagattgacacataaaatccagtgtacagagaaaactggaagtgtttcattcccctggcatcatcaaaacagaggtggctagaaaagaccacacactgcattgccagatggcttctggacagtttcttcatctcattagcccaatacaattctagaaagtactttttcctttcttaattgcttaactatttcttttccaagcatgacttagaaggtatgactttttcttcacctcctcctggcagctgccaggattgttacctcacttacactgtgctttcccttatatgctggtaaaattacccctggacttccaaaaaaaaaaaaaaaatcaaaaacccaggactttgtccatgcttagacagcactctcctacctgaaccacctccctgcctctaaacaagtgtgcctaaagtttctgttttaatccctaggatatcaagtgtgtgtacaatgttagagtccagctctgctgtagcaatgccacattaacttcagcccctttgtggcactgggtatcaaacccagagccctgtgcatgctaggcaaatgccttaccagtgaactgtatttccagcccttactttcagtaacaaatgtcttgtcatttctccgtcccaccctgtgtatacttctctctgccttccactctcattaatgtgtgtggctaacaccaactcaacaccaagagctctaataaatatcactttcctaggggctggagagaaggccagagggtgagagcacttgactgctcttccagaggacctgggtttgattcccagcacccacagggcagctcacaactgtctgtaactccagtcccagggagggccaacgcccttctctggcttctacaggcactgcctgaacatgtttgaacagacataatataggcaaaacacccaagcacgtcaagtaataaagtaaataaatctttttaaaaaaattgcttcctcgacgggcgttggtggtgcacgcctttaatcccagcactcgggaggcagaggcaggcggatctctgtgagttccaggccagcctggtatccagagcgagtgccaggataggctccaaagctacacagagacaccctgtctcaaaaaacaaaaacaggggggtgggggtgggggtgggggtgggggtggaggctcagataaacaaagcaccaaatgagattaagatagaataaaactggggactggagagatggctcagaggttaagagcactggctgctcttccagaggtcctgagttcaattcccagcaaccacatggtggctcacaaccatccattatgagatctggtgccctcttctggtgtgcagatatacacggaagcagaatgttgtatacacaataaataaattaaaaaaaaaaagatagaataaaaccattgtaccataaaaaaaaggaaaaagaaaaacaaacaaacaaaaaaaagaaattgcttcctctagaaaacttccctgactgctcagaaaggcctaggtatcatatccatgttttccttccattttttccatactgtgtcctaaacatatcattaacccatcctgtcaattattagtggtagtctgcatcaccttctacattccttgtgtactaggaccaaatccccagggcctaccactgtctgaaatactgagtagggctatatagctcagtgatggagcacttgcctagcacatccaggccctaggaatttaagtccatcctcagcattgtctcaaaaataaaacaagggactagcaagaaggctcagcaggagctgggcggtggtggtccacgcctttaatcccagcactcgggaggcagaggcaggcggatctctgtgagttcgagaccagcctggtctacaagagctagttccaggacagcctccaaagccacagagaaaccctgtcttgaaaaaccaaaaaaaaaaaaaggaagaagaagaaggctcagcaggtaaatttcggcgcttggcatgaaatcctgctgatgtgagttcaaatcttcagagaatctacatgaaggtgggaagaacagaaccgactccacgaaactgtcttctaacctccacctaattatataaacttttaattgtaaatgtatatagagagagcatatgaatgaaatgttcatcacaaaaaatgaagtgttagccttataagaaaataaactgaaaactgttctccagatgttttacctccaaaaggctggggtatgggaatatttacctgggaactaatggagtacttcaggtaggagaggatgagagggttgggggaaggtccgatcatggcctgctccaggagtgcttctgcaaggggaattaaagaaaggctaagtggttggagctttccggggttcaccccgccccatccgtccttcacgttgtactggacacctgctaggttgagaatgtcccaggtggctcctctaggaaagaatttcttcatgttgattgcccactggtagtcactccatcgctctttccaggcttgtaaaatggcttgcttcaggttcaccaccttcatgatttcactccaaggaggcgggaccggtggcggggtgggcgtttaaaaatgctacgagaggagagatggggttctgagggaaatcacatgggagagataaacacaagggaaattcggaaagacttaagcgagacagaaaaactagacagagtagaaaccggggcggcaaggtagagattcttctgtcacgctctcccgttctgagcaatcgttccttgaactgggacagaggtgtatcaaacgggccacgccaaagccctcaagagagcaggaaggggttaagcccgccccggttgccgaattatgcccttcgctctagctgtgcccctcaccactaccaccccaaacccagatctactcattcctcatttcctctaccttcctcggcgctgaagctgtaattctccctttcctttcattcaccatctccccaaatttaagcctaccggaaaaccgagttctacatcgtaggcagcgccatcttggcacctattaaggtactcatttactattggcccgcgttgacagacaccgaccaatagaaacgtagcgagaggcaagtcctgccacagtaccttctgggaattgtagttccttaagctttgtctttgcccacaagcaagctaaagcattagtgtaattgtttcctggtaggttttctctgagatgatacagagagctgaggtacgtttgtaccaggagactcagggcctagggaagaaacactctgtctctcaatgtcatagccatctatctgtaccttcaatcattctgatactctggttatttccctgtaacgagacacaacttgggtgttatgtgttatatatgcagtgtgttccaacctggcttctgttgggtttttggtttttgttctccaaagccccttcctgttgccactagaggtctcgtttcttttccaaaagagacactgaagtgtggctagttgtacacataccaccatttcactccaaagtttgacagtgcttccagaatcccctgatcctgaatactgtaaggaagtaaggaaaaaaataaggccagatgtgggtggcgcacacctttactcctggcacttggaaggcagaggcaggcagatctctgtgagttcaaggccagcctggtctagagcctgggtaggctctgaagctacacagaaaaaccctgtctggaaaagcaaaaacaaacaaacaaagaaggcctagagaaagaaaatgtgatgtagtactgtgggtgagaccaccctataaaacacacttggaggccacagaccagtgttttataacccctctttttcttgactcccaaactcagatcccaagaagactgataactcagcctgtggcttcaaaatccatttatagtccccaacaactccctttagtgccaccctccttttcgtacaggtaatcaagcactgtaccactgaactacattccctacttcaagcttttgaatgaaaatcagcatcaagcaacccgtaaaggctctgaaaatggccttgtagacatttagtaggaaactgataggagcctaaatacctggaacacaatataaacaggagtagggccagatcaatccttctttttctttttggttttttgagacagggtttctctgtggctttggaggctgtccaggaacaagctcttgtagaccaggctggtctcgaactcacagagatccgcctgcctctgcctcctgagtgctgggattaaaggtgtgtgccaccaacgcctggccagatcacatccttctaagactgatactgcctatggtcttcttccctctctccaatccctccccccacacacaccctctccttattcttctccttgcgccttcccaagggatactactggagaatagtatttatacaaaatagctgccaagtatatgtagccaaagcttccaaagcaggaaagagggagaactcagactcctgattcataaccttcaggctccccttccaaacagacctgcactggatactgccatgggcctccttctctccagtctctcatctaactggcttctctccctctatttttgcccattgtacccccctactcctttctgttacacagcctgatgcccttccaccaccaccatggactgttgtcagatactgctgctcttttcctacccctcatagcccaaactgcccctcttggagacgggctgtcaactccgtgagtgtgccttattgaattaatgagtgttgggtccagcccatatgggagggggtggggatacttgggcctgaggctggctggattctgagctcaaatccttccctctggcgcaaagcctggcagatcctgagagggagggtgttcctccttcacacttcataatgatgagaggcagcttttggtactgagccatctgccttccctggccccctgctcctcaccagaagtccattctttggcttggcagggtttcccccaaggactcaactgtacggacaaggacttccgaagttctgggcaagggctatcatccacttctctacttcttccctagcccacctccttcttcctgggagctctcttaagctctcagaattacctaccacacagggaagactcatgatgctctcaagagagaaaagatgcgtttactcaactggaccgtctttaactgtgcctcggaggctgggtttccactccttagctctctttgagcctcagggatctttaccatttattaacttattttattatttgtgtattatttgtgtatgtgtattatttgtatatttctctctctctctctctctctctctctctctctctctctgtgtgtgtgtgtgtgtgtgtgtgtgtgtgtgtgtgtgtgtaggtgagtgcatatacacacatggaagcaagaggttgacttcagtgtcatccctaattattttctccacccactttgtttgaaacagtgtgtgccactgaacctggagctcacctcattatttcagctagagagctggccagtgagctccagggatccaccatttctactaccaccgctccccagtactggggttatagatgtgggccgctgcaccctggaactgagcatccaaactttggtccttatgtttacatggcaatcactttactgactgagccaccctccccccccttttaatttttttttgaaacactgtatgtctcaggctaacctgaaactcaagagtgttagtgtcaagctggtacacttgcttcagcttcttgagtgctagaggtatatgcctgtactaccacacttagcaacatcttcaccatattggccggtctggctgacagaggtctagctggagaagaggggcaagtggaggccaacaggcagaatggcatggaaacatccagaaccaatgaaaaaagcatcctggccttggagtaagaaggtacaagaaatagggtttgacttgctcttgtagagaacctggattcagttcccagcaaccacacagttctcacaaccatctataaccctgttccaggggctatgacctgcataggtatcagacacacgcatagatacatgcaggcaaaacccatttttttaaaaggcttaaaaaaaggaaggaacaaagttttgtacccaagagggagtggacattccttatctaaactaataaaatatggataagagaaagtaccaagagcccagaccccaaaacccagaaacagtaaaatcatttagaagcatacaaggcccaaataatttcagattccctttttctcagagggaaaccgagtcttgcccctcttcggaacggaggcttgcctgactcctccttcaacagctgtgtgaggaacaaaagtctttcctacatgctcatatatatagctccaaactagctcccaaattgaaacctctgtattcaaaggttggagagatggctccatagttaggagcactggatgttcttccagaggacctgggttcaattcccagcagctacatggcagctcacaacaatctgtaactccaattccaggggatcctacatcctcttctggtccacaagcacaaatgctggcaaaacactcatactaataaaacaattagccgggcggtggagttgaaaacctttaatcccggcatttgggaggcagaggcaggcggctctctgtgagttcgagaccagcctggtcttcagagtgagttccaggacagcctcaaaagctacagagaaaccgtgtctcaaaaaaccaaataaataaataaataaaagccaggcatggtggcactcagctttaatcccagcacttggggagcaggtggatttgagttcaaggccaacctgttctaaacgtgaattccaggatagccagggctatacagaaaaactctacatcaaaacaaaaacaaaaacaaaaaatccccaacaacaaatggcaacaacaaaaagaaagcacctgctttctatttatgtaatgcaaagaagcctataggtgattatactttcccgacagtccttgggttcccaacactctgtctctatcttcttgctaactcagaagtgaaaagcagaatttgctcagggttctttgttttgtttttgaaaaagggttgatttatttttattttatgtgtatagtgtcatgcttatatgtatgtctgtgcactatatgtgtgcagcgcccacagaggccagaagagggagacagagcccatggaactggagttacaggcagttgtaaactaccatgtgagtactgggaattcaacctgggtccactgaaagagaagctagtgctcttaactacaaagcagtatctctagcccctgggttttattgtttttgagacagaaatttgctatgtgtcccaggttggattgaaatttcctaagacacctgacttgggctggtccccaggtccttatcctctggcctttgcttccccaattgtgaatacaggtgtacctttctaaaaacccagatagaagggtagaatctgaaccaatccctgtaagtttcctaattccctgaaggatgtctccctgattcacactcctgacagctgaagaacagaagggaagtgttgtgatccagaaactccagcgttagggaacggaggacagcctgtcatttcctcggtagtaaacatcccttcaggcccctaaaaccactctgccactctgtcctctacttgtatgtacgagtgtccagaggataagcctgggtgtgccattccccaggctctgctcctttatctgctgttaaagtctctcactggcttagaattgaccatacaggttaggctaggaaaccctaaggatatacccatctctgtctccccagcactaggatttcaagttcttgctaccacacccagctttgttgttttattttgtttgtgtgtttgtttgtttgaaatagggtctctctttatagagcaggctgacctcaaactcttaaacatctgcttgcctcctctcctgaggtatggatttaagatatgcaccatgggtcctggagagatagctcagaggttaagagcactgactactcttccagaggtcctgagttcaaataccagcaaccacacagtggctcacaaccgtctgtaatgaaatctggtgccctcttctagcatgcagggagaacactgtatacataataaatgaataaaataaaaaaaagatgtgcaccatgacacccagctgacacacagctttttatgtgagttccggggatgggactaagtgcctcatgattacaaagctagcagtttgctgacttagctctttcctcactgtgccttttattcttgacctccatgcagactgtgccatcctctcctctaactggaggcgggggactacagggtggcaagccctacactctgatggtaaatactagcctctccccattctttctctcctgttggcaaaggcaggatgaggggattatgggaaaatgaaaccagaaggtgggaacatttggaggatccaaagcctggcacacattaaatatttttttttttaatcaaatgaggggctggagagacggctcagtggttaaaagcactggatgcttattgctaaacctccttcccaggaaatgtaatcaatgtctatcctttcttctaaggtctcaatgacaaaccaaggcacagatctaccaaggttcactctggggaggaaacaaatgagtttactgtatttccttacaaagcacaggtgagggtttacttatggggtgtggtgctcctttcccttagtccacacctgaaagcatttatccagtaggcttgagggtttccccatagctgaataaatgaagctaaacacaccagtcatacatgtgtactctagcaggcagatctctgtgagttcgagaccagcctggtctacaagaactagttctaggacagcctccaaagccacagagaaaccctggctcaaaaaacaaaaaacaaaacaaacaaacaaacaaaaacacatgtgtactctagccctactaacagtcaaggcagcactttatgccacagctggttgggaacatctggatgctcagggaagggtcctgtgactctccacatcccttctaagtgggtataaaacaacaagtccagctgagatgatcttgttgcaatgggagttacccgaacgccccaagatagcagttgtttggctcagaggatggccatctacagcactgctggtccagaggatctgagtttgattcccagtacccacatgattgctgacaaccatagctaattcctgccctgggggatttgagactctcttccagcctcttcaggcaccaggcatgaatgtggtacacagacatgaatgcaagtaaaaacacccatataaataaaatatttttaaaatgaagtcaacattcaggagacagaggcaagccgatctctgagtctgaggtcagcctgatctacctacatagtgagtttcaggagagccaggaaggattacaagcaagactctgtctcaaaaataaaatcaaaaggaaagaaggagagccaaataaatgaataaaggtaggagaaatcttgagagtcaacccagagaaagcatttgcttgtttatgtattatttagttttttgaagatagggtttctctgtgtaggttgacctggaatttgttatggagacccccttgaactcagagacctgcctgcttctgcctctcgtgggctagaattaaacgcatggctcctttttcttaaacaaaacagaacatttatgtgtatctatgttcacacatatacatagggaggtcagaggacaggcaggaatcaaggctcttcttccaccatatgagtctcagggattgaactcaggtcctcaggtttggccgcaagaccctttaatccatctcactgacccatttctatttctcgatttctttgtttgttcaattttattttatgtgttacgagcattttgcctgcatgtctgtatgcatgtgtaccacatgtatgtctggtgccctcggaggttcaaatgatgctgttagagcccttggaattatggatgattctaagccaccatatggatgctgggaaccaaacccaggtcctcttcaaaagcaataagtgcttttaaccatgagccatctctccagtcacttccaacacttcttaatttagagagcgttaagggggagaagcttttgggtttaggttctcttagctggtgatacttgaatttcctcagctttctgtacatcacacccccaacaaatggcactttgcagacccaagatctgttggggaccttcccacttcctgacatcactcactcagtaaactggatcactttgtaacttccaggtgagatgcaacaatgggaatgcagcttggtgataaagtgtgtgcttatgctttgcaggctctaagtttaacccccaaaaaacaaataaagatgaaatatagagggcagttactgaggtctgggctagctagctgcagggctggctggcagaagggcctgttccctcgtttcccaaattgctagagatctacaagctagcagagtgaaggatgctgagtgggttttggctgccaagcttttggaggaagctctgcagaaagatatctcctggttcatagggggtggaacctgcaagaaatcttggggtgcttcctagcaacagccttggaggaaggggagggagaggagaaaaggagagagggcggggcttgggcatgtcagctcccactggagcccagagaacaggctgttcctcctgcttccttggcaaccaaaattcaagcttgggggggggggcagctgacagagagacagagagagccccttggagggtctttaactatctcactcatgtcccaccttctggctttctccataggtgaggcagtgcctcgaagcagagatgaggggataggcgggaacagtctgatggggggtgtggttcatggcaaagagagaaggaacgaacgggagctggggataaactgaatctgagaagagctggaagcttcagtaaacaggtgggcgggatgagcaggcggtaaaaaggatgatgcaacaccaggtcaggggctataagccgagacctggactggatcctggcatctggtgagatgccagctctggaggcagcatgcccttcactttgcccttgtccaggtctgttatcagcccatattggagacccaggggaaagtgggaatggagaacctttgctgtaaagctcagtgtgccttgctctacccatagcctggctgcttgaaggtggtcttgtaggtgtttcatttgctagatctcacctaggatttcagttggggcaggatattgagaatttaaggaggaatcctccatctttagagcctttatcaagacagatgtagtggagaatgactgaatcccaggactcagcagttgggggagaggagcaggaggctcaccagttccaaacattttggcagttagggctatatagtaaattagtagcaagaccctgttaatcagaccaacaaggaaaacaaacaaacaaaaaactctccagaacatggagagatacaagagtaccaccttcccatctgaattcttgaagcctggtcctggtccaaattactgctgaaccactcaagcagaatataattgtatttctcataccccgggattatctctcagctcctctggtaccccagtctcaagagacttatttccgtatgggcttgagcatggcccctgagcctgtacactgccttgctccccagggtttccgtcaaacctgattattgttgaggtggcttccattggcagacagccactctcagccctctgactgcacactgcaccctcctgctttaaactgcagctgttgcatgtccacagggagccgggactgaacagattcattgactgcatgctgactctgcacactgcagcctcagtcccctactgcagctgccactgtacagtgcaggcttccttcagcctgtgtgtgtgtgtgtgtgtgtgtgtgtgtgtgtgtgtgtgtgtgtcccatcaccaataactgttaccttccactttactcttcctcatcccagttttccttctcttcccttttgtctcaggagccccaagagaggcatccttccttccccacaagcattgcaaacccttaaaatcccttgtaagagaagtggctccgtggttcagggtgtaggtggctgagactaagatgagcaagggcagcccaacttggatagactgttggtcagcatcccactcagcaaacgattctatccagtataaactgaacggttagaagagcagctcccctgacacactcactggctcctccccaagagcaagctggggaggcagggctccgccctggcagccgtgggaaggctatggcccccgctggtaaaactgggctaatgacagcgggggaaccggcggggccagaggggggtgctagggtaattagacctctgcctggcggtagtagatcccgagatgaaaggggctatggcgtcactgacagggttttatgtccatgaatgcaaaggggtgtgcgtgtgtgcgcgcgcgcgcgtgtgtgtatgtgtgtgtgtgtgtgtgtgtgtgtgtgtgtgtgtgtgtgtgtgtgtgtgtgtgtttggtgcacgtgcgtgcgcgtgcgcgcgcaggggtccggaactagcatggagacctctcctttgagaaaatgagtccatctatttgcagccactctgctccttaggttggccctggaaccatttggattttgatggtgcaaacatgagaggagatcgtacctcagtgaaactgggagccgagggacagtagagagtcttgcccacccccctccccaagcttagcacgggctgtatattgttggggaatggctggtgggcactgaatagaaagagcctctatggagaaaagaaacgtttgcaggaggaggcagtggatccagccttaatgttagaaatgagaaaggaggcatgaaaatgaaaaatgagactccaaaacggttagaaaataaaatggttgaagttaggaggatttcagaagttacctgcccaacacttggattttaagctctaactaaccctggcagctgtaatttgttcaaggtcacacagagagttgcttggagagaagggacccgaactatgaaacaaacctatcgtttggtatctgggctttctcccagatttataaggtgcagagaactccccgaaacttcccctctacctcagggtgcaaaccagaaaacccccaattctcccagcgagtaaaaagctattaaaaaaaaaatgacatcttgctcaaaatgtgtcacagagcctcctcgctcctcgacggagcctcaggggtgaagtgggcgagtccgagcctagtagaggccaaggcgaacgaggggctgcggggcgaccagccggggtcccggggcgcggcgcgggccgaggggcgggggccgacggctgcgaggcggcctgcagggagcagccgcgagccggccgggcgcgcggagccggagccccagccggagcggggcgggggagggaggagcctgagcggccgccgcctctgccggaggagccgcggggccgccacactcgccccccgcccccccgcgctcactcgcactcacaccccggcgctggaggcgggcggcccgggcccaaccggccccccatggacgcccccagcacggggcgctgagacccccgcgtcgttgcccaactcggttcagcgcgccaagccaaggtaaggaggagggagcgagggggcattaatatgcaaatgcatcgcgattgattatgcaaagccgcgggtctctggccagctcggaggcgggctgggggcggccagggggttcccgtcgccgacctgtgcctttccgggcgcccgggtgaccctgtcacagcccgagagcgagccactgacgccctgggaaagggaggtgctgttaagtggtcggtgggccccggggttcgctcgcggagatggcgtctgggcctccccttcgagggcccgcccggcctctgtccggccggtctgctgcgcattcccgggttgggccccgctgcctgccgaggctcccccgcccgccgcgccgcggtttgtttacggtgtgccagaagcctgtcgtgcccccccaaccctcccccctccgccaaagagggcgaatggcctttgcaaagccgcctccagctacggagggcaatgtgggtgcggcagggtgggggggggccttgcatgggctgggggagagtgaagtccccctcccctccctgctttcccagttgagcatggctttctggttgcaacactcctaattgcaaaaacgcggcgggtggggtggggggaatgtgagcctgtagtagtgggggtgtactagtggatggtccctggatgattaggagaattgctggcctgtggtggggaagagaggaagcaatggacccgtgtttgtgtgagtgtgtgtgtgagtgtgtgtgtgtgtgtgtgtgtgtgctcccctgtttccctccctttgcaacgtgtctccggtggcccttttctgtctagggccctcccttgtccagtgtgaaaggaaggcctgggaagatgtcaaaggcaatggagagagccacccatttcggggaccaggggtgggggggtacacagaaggaaagccggggagatgggagcctgcccctgaatgctggctctggacccaggagggggaggggatgaagggggccattgtccaagatgaagggggaggcaaaggtgacatgcagacacagatatgcccacacagacagccacacgaacactcagggacacccaggcagattcaaggacaggagctgctggacacacccacatggggacaagggaagaggcagactgctgctgcatggtggagctcaaaggggttggacacacccacgggagaccaagagcagagagacagcctgtgcacatacccacgcacagggtcacagggagatgctgtcacacacaggggcaaggaagagtcgctgtcactatcacatgcatgcatgcatgcatgcacacacagcagttgcacacagccgcacaattacaaaagaccctgtcactcacaagcacacacgagctcacatgtgcccagtcatgcagtcatcattgcttgccatgacagtcactgccactcagtcaaacaaaaaacacagctacacatcaacacatgtgtactcaacttagcaacaagtattttcctgggttcatctgtggagctgaggttctatggacaacaaaacctttgctaccgagaaaatcaaattcatctgtataaaaagacttttctgcatattggtgcacaggatgcattcctgataatatagtctgttactgttggttgtcataccacccagttactagatggcaatctccttgagacatgggagaacctctagaagaaccctggatcccacccagagcctagcacagtgtgtgctctgtaaacacttgttaattgattgactgtaggaactccaggcacaggtgcactcctttacacctagtctcacaggtgcaggggccatgcacagggctcccgagtgcagtcacaggtcccacctggcagtgtccagataacccttgcagatagacacattgtagctagggcaggaacgcacttaaatgcacacagccacagactattcccgctggcttctttctatcttctaggctcagccactgtgtagcaatgggctctccccccccccttttagagggacagagaaacaagagcaaagtgggtacaaagggggttccagagggccgagtcatgggcctgcagcaatgtccagtgacttctagcagctgggattgtgctggttgctgggggaggggtgtctggggaagagttgggagtggctctctggctctctttcatccctagcctataagccagtggggacctggctgcccctgctagggtttatttggctgggcctttcctggggacccttagttgtccccagctgagtgcttgcctcccactgtgaatctgccccctttctcacctctggccctcttgtccaaacttggaagctttccttgggaggccgtatgctggctggcgaatgtctgtgtgagtgaggtgtatttttgacttggaatttctctctaactctgtctgtctttctgttgctgtcttggggtgtctgactctctctccttgtgtctctgccagtctgtaactctctctctctcttgccctgtgcttgtcttcatttctgccacggtctcttttctcagagctggcagcaacattcttcatacttttccagttgttaatgctcaaattcgggccctttggcccgcccagcctgcttctggggtcagcaggaggttgggggggtgggggggtgctcagctggctgctcaggacatcctgcctttccttaatgctgcagctgcggctggccagcatgttttgggggctggggatggggaaagggaggggagtagactcccctgttgacccctgaatctggcaggcccacagggaacaccagttcagtgggagcactttaggctcaggctacaactctttaaggaggtggtgaggaggctccttccctaactgacccaggcgggaaaaccatgctcccccctcccacacacacacacaccttgtgcagtgacaggagttggcaggacccagttgggtctgcattaggactcatgatggcctttcttcacacccctggcagctgagacctacctcagagatgtccccgacagctgtgtcttccttgcccaacttcatgcttggttctgagggtacagctgtttagactatgacagttttgggcgggttgtacccatacatgaggacagaaagagtggctctttgaacaagggctactggcacaggagacccaaagcctgggggagggcagtggcaccagcatgccgagctctgcttcctgtagccttggtctgtttggatgagaacatactagtgatgattccatcatagaatatgtatggacttcaacagaaagataaactgaggtttatcacaaggcatacatagccagatgaaagaacaaggtatcattattctatcaggtcatattgcagatcttgcgttgttatggtcaacaaaatcggaattttgttgtttgctttggagttcagctgcctaagtttgaatcctaaatgcctcttcctagttgtgtaaccttgagaagacttttaacttccttcttgccttatctataaactagagatgatgatatctatctcttttaacttttgatatttatagttgttaaaaatatattagatgcttgggaggctgaggcagaaggatcaaggccagtctcatcgacacagagttggaggacagcctgagctataggagacactgtctcaaacagatagacaagtatacaatgctttaaaattgcccagttcatagtgagttgtagtgaatggcacaagcctggattctcagcactggctggaaagcctgaggaaagaagccaggagtttgaagccagccttagacacaaagtaagactcccccaaaatgtccctagtttactcctggagaccctggaatttctggttaaagtgtagtagagatttgggtgtcctgaacatcacaggaatgagaagggaagtgaggggggagcaatgtatgtccagtctcttcaccgttcacataccatctctggctcacaggggggttttgtgtgtgtgtgtgtgtgtgtgtgtgtgtgtgtgtgtgtgtgtgtgtgtgtgtgtttctaacaagaactaagagcccataggcctcagttctcagctggcctctctgcccctcttctcctgaccctcaccttttaacttaaaaggagtccttggcatctcagcctgggacacacctcctcagctaaaagcacatgcatgaatgcctgagtgtcaccatatctctcttgggacaaagtctgagtgtttacaatgagagagacagagagagagcacatgcatgaaccaaagcggtgccatctctacaagcctaggaactcaggaaggagcgcccttcctcctccttaggctaccagcactagctaccttaccaggaccttgtcctggctcgaagacaccagattccccaatgcccattagtaaaaggtggtggcagggaggaaaccgagatgctgaggaaggagcaacacatagcacctgggtctgccttggtgtcccttacttgactgtgactttaagaatcaggatcctttcccccacagccccatttgttcagcccctgctcttcaaggtgaagtaaggacattgaatgggccctgtctgttagtggagtgactcggagcctttggtgtgagagacagtctcagttccagttcttatggctacagcggcgcttagggaactttggagcctcgtgaggggaggcaggtgtggtgtgtggaaagaatactggctgggagttgggggctgggtttttgccattcaccagttgtgtaacttggggcctggctttttattatatattacccacttagggtaagggtcaagaacataatattgggcgtagggctatagctcggtagcagaacacttgcctggtgtgcatgaggttttaagtttgatccctagcactgcaggaaaagaaaagaaaaaaaaacaagacacataaagcaatatggtaagcatgttcaatctgtattgccgcctgtcatggtaagctagctagctgttcctgtggattcttctctcttcctcagcctggcaaatgccaggctgaggatgcacgtgccaccgggaaccagggacagtttcatctctcactgagacatctgtggctctcatgcagtaggacgcgtgtcatgtccttttgcctgacaggcaggagatggggtaccaatagggacctccttcctgtttgttcagagaggtcagaagttcacaggtagatggggagacaaaaatggatattattgcacccggaaatactgccatgcttctttgctttgcaggtgggcatttgacctgaagagagggagttaggatttacaggttagtgccagaggcacagccacacccactcagcagtggcaaagagtggtggtttgggccaagcagccacccaccttctcttctcctccccttcctcttgcaaggaagagatgagctcctggctccgaagccctgtctgtttcattttctcttttaccaggcctggggaggaggaggaggggacaagctttggtgactatcagcattttcatacacatcagtgagtgggtgtgttgtgcatgcatccatgtgagtgttttgtgcatgtgtgggctgggtagggctctgaatatctcctggaacgggtcctggagccctgtagttctgcgcatgcgggatgaatgtgtgagtctgcacgtgtccatgtgtgtgcctgagactcagctgcatttgctcttctctctctctctctctctctctctctctctctctctctctctctcacacacacacacacacacacacacacacacacacacactctctctctctaatctctctcccatccccagttccttttccttccttccctttctattcttcccctccctctgtctccctctgcgtctcctctcttgctctctgcctccctccctctgccgctgccagttctgactaggtgggggctaactcttgcctctctggtgtgcctaggagaacatcctgtctttccttcccctacatcattccttcccttcccaggtgatgtttcctgtggttggcaagcaacttcttctgccttagaagaggggactgcagagggagtacccccaagccttgtgcccatgatgccatctgctcaagtgccttggccccatgacattcatgcctccagcattcagctgccccagctccaattaccccgatggctgagggtggggtggggagaatacactatgcccagtttttttttgggggggggttgctcctactttgccttcttggtgacttggatttcttgctgttttttctggagggaattgggaaaggggacctgaaattctgtgagggatgggtgtacagtcatccatcactaagtgtggaggtgtggagactgaacatggccagggaagtgacctctagacctagcacccttgatgctttgtggaattaacctggactgggggagagagaagaagcaggtggctaaggctctgggggagtggggtgggaacacagtctttgatgttaatactgggcatctggcccaagacaaggctactgtttatgtctttctgtctttgacctgcagggggggatttcctgttatagtctttctggtggtggtgagggggggacggacagggaggatcctttgtttaagcaacccgtctccccctagtgcacatcccccacctagcctcccattccctagttttaaggcctacagtagctaggaaatctgagttccgggtcactgctcttaagttccagagtgctcaagcaagatcccacccagaggtgctgcctctcttgttccccacccccacacctataaacggcgcctatgtctgtgtgtacttctctgccaaatagtccctgccttcccgccttccctctttcctggcactgggatagcagagaattgggtggggcaagcccaatccatacctgagaccagaacgaggtaggggtctggggaaggagggagaagccccagtcctagggaggcatctgtcctgaaacatagggtatgtgttgccagctcaggtacacaattggccatagcctctgttaggtcggtgctacttgtgggaacccacgctggcaccgggcacgtcggcacacagatgcctgtttgcctgtgcatgcccgtgtgtgtttgggctacagtggccgccctggcctctccacattgcccttgatgattccatagtatggaatcaggacatgtaggcatgatgactgggagttggggtgggggattcttacccccatcctagtagcaagcagaggggaaggggagagggaggtgtgaacctacccacagcactattaatagcccacatgccaggccaccaagaaccagctgtcaccgtggaaaccatttctgctcccccctcccccagcctccatggggtgggacttaggcagggcagaagcaccccccacccatctttctttgttactttcctttctccctttgtctctctctttcatccgcctctcttccctttatctgtccttcccgcctcaccccttccgccctcattctccttctcattgctcccttcttccttttccctctacttccttgacacccctagctctacccacatccctgcttcatctctttgttctcccctttgggtttttctttccctcttccccattattcacaccacctgcctcttcctcctttttctcccctttacagctccccactacagtgtgcatacatgcatgtgtgcctgtgtgccctggtgtgtgtgagtgcatgcgtgtgcatttgtgtgcgtgtgtgcactggtgtgtgggagtgcatgcgtgtgcatttgtgtgcatgtgtgccctggtgtgtgtgagtgcatgcgtgtgcatttgtgtgcatgtgtgcactggtgtgtgtgagtgcatgcgtgtgcatttgtgtgtgtgtgtgtgcgcgtgtttgacaaggatggctgagctttcttcagagtgttaaggacaaagttcaggggccccaggaaggcagagccatagcccagtacagatgctcagaggcatgcttgctgcatgctgctagatggctaagggcagagtccctgctggcagtctcaggagtcctctgggcgtatcccagggatccacagagctgcagagtaggacaggcggcagtgggaacctggcatagtgcccatggatgccgcattggcttcttgtccctgtccccccattgcagaatcacttaagcttaatgaaatgcttccccctctatgggcaacttgcccattctgtcacccaacagctcctagctgacaaagaaggagtgggtggccaggccagtggacaggtgggtcttgctgtcctgctgtccaaatgaaaatgagtacctgaaccctatagctccaccccctctgtctctttgggtctgacccctcacccccaccccttgcaaaggatgtgctaggaaggagctggggatattaagctgaactccaggaagagtgggaagaggctgcccttcagggtggttatccttgacgtaatacccctccccactcaccttttcccggcctgtagctaacatgagctcacatggttcgtgccttcctgcatgctgggcctctgcctgggctccgtatagccttagaggtccatatatatccttggagaggctttcagctgtccccaggggttctagagttttgctaggtgccaggcaaaaatgctctaagaggtgaggatagcaccttgccccctcccattgccaggggataacctggactacagcacctggcaccagggcacattcagctcagcacagaggtgcggcagacaaggaccctgcccctcccgctgtgggcacgtgcaagcccttggcagtgtccagacacatttggagttaaggctgggccagggaggagagaggggaaataaacagggtagcttagtttggcactgccccatgtctgccttgtagcaactggtagtggtgggatgctggtgggggggaggcgggaagggcacctccagagctctggcctgaggcaggagcctcctgtgccactgctcctgagtgaggttccctgccaggccctgcccacagctgctaatacccattcctgcactccctggccttctttgcctgcccccaaggcctgttccccagggctgcccctctctctgcttgcccactcctgggtctgcctcctcccttccctgggggcgcttgggcctccggctggcgagtggatttttccagcttctgtaaacaagtggtggcagtgtgccaggcgggcaggagacaggcgggggcaacaccgcagccagggtgtgccaagcaccgaggcacagttggggcggggggaacggggagggagacacccagacccagagagagagagaggaagagaaagagagagagagattcagacagacagacagactaaatgaagccttgctgggcacagacagcaatgggaacagactagcctctattgtccagcccccatcgggctccttgctgttgcccctctgttctagctaagagcagtgggccccagtgcccagccctgggcatccccacccacttctcctcctcccccacctccaccccttagggctggctacgccattataaatttataacaggaatttctccacaagccaagaaaaacttgacctactttcttgatggctccctgggctacgtctccccactcatccacccccccagactcctgtccagcccccagtgcccagtcctggcccgggggtgtcagagacatgctaggccccttctctgcgctcctcctgctgccctgcccctgccaatgccctgctttatctctgccccctcctctcaccctgactccttatcagctcatgggggtggggcggggggcccaaggcaaggtctctagtgcagcaaccacgtgatggagttctaagtggggagctgttagcctcccatatgcctgcacctgcctatgtgcttgcagacagggtaccacaggcctgcagccaggatcacagagggactggaggtggggccatgtctagcactatcctggctctaagtagcagaacaaggttagcattagagccaggctgtggctacctgcttcctagctgcatgaacttgagggactcaacaagctttctgagacttggtttccccaacctggaaggttcattttattattttttaatgttatgctattttttttttgtttttttgttttttgtttctgttttttcgagacagggtttctctgtggctttggagcctgtcctggaactagctcttgtagaccagggtgatctcgaacgcacagagatccgcctgcctctgcctcctgagtgctgggattaaaggcgtgcgccaccaccgccgggctgctattttgtttttgatataatgttcactgtatagtgtaggcttgccttgaatttgtgacagtcctcctgcctcaaccttctgactactaaaactatagactactaaaactatagagctacatagacatacatcctcaaacctggctcgatctggaattttttttttttttttaagacagggtctctagtacatactggtctcaaactcatgatgtggttgaagaaaaccttgaacaacttcttttttttttttttttttttcttttctgagacaggatttctttgtgtgtagctctggctatcctgaaactcactttgtagtccaggttggcctcaaactcacagagatccgcctgcctctgcctcccgagtgctgggattaaaggtgtgcaccaccgcccagccaactctgaatttctaatcctcctgcctctagcttccaagtgctgggatgacacacatgcctgcctgttccgtctgcggagctctcgagtccccttcagaaggcaccatcatatctattcagtcaacagcaacatgtgttggtttccttccttttcccatcctgatgaatggcagccagtcagctaaaccagctaattctcattcttaaactggactgggctttgggacttgtgagagatttaagaactcttaaaggggccagacatggggccaatacacccttactcccagcagcccccaaagcataggcagatggatttctgtaagttctaggacaacctggtgtacatagtgagttccaagctagctagagctacatagtaaaacatggtctcaaaagaaaaagaaaaagaaagaaaatcctcgaggggtaagagttggggtttcattaatgccctgagagcagagagagtcagttcccatttgcatttgttgtccctctcctttaagagtgggctagggccgggcattggtggcgcacccctttaatcccagcacttgggaggcagaggcaggcggatctctgtgaaatcgaggccagcctggtctccagagctagtaccaggataggctccaaagctacacagagaaaccctgtctcgaaaaaccaaaaaaaagagtgggcgagggacataaaccagaggaatgatactggcctagcatacacaaggccctgggaccgcccagaattgctaggcccccaaaagacacttagtgggaaccttcgtaatccctactgctatccctctgccccaccctgcctttgtgggggactccccgctatgcctgtgcttcaaacgtgtgtctctgatcccctcttgccctataaccctgataaatcctaagaaatcttgggtaaagggtggtaacaatagctaatatttaataggcgctcataaaaggccaggcatttgtttgaatgtgaatattgagacttgctccctgccgcgtagatgacctcattctttcccttcatccctccctgtgtctggggcctgtgctgtagctctccaactgtacctgtgataaaaggttattctggccctagtcctggaccttccctccatgccctctgacatttgctacaggccccagatagccactaaatatttcccctaactcttgctcacttacccaccccaatggcaacttcttatccctgcctctctctcttctctccacagatatctccagacaggacaagactctgaggaccctcccagcccctaacccagtgctattcaccaccccagcttgcccctagctctcccacctgccactccctggcccctcccaccacccgccctcaccccttggggcgcagggcatggtgtgaaaggctgagtactgaggcgggtaccatgggtgctgtgccctagggcctgggtggcggggggtgggtggcctttgggcgtggggggcgggcagtgtgcccaccccagtctcttggcgtgctggagggcgtcctggatggaactgaagtgaatggaacagaagccaagcaaggtggagtgtgggtcagacccagaggagaacaggtaatgaatggatctggcaacctggttgtacctactcagagcaacaggcatggacagctttctgggcttaggagagctggtctcttttaagtacacctgaatatggacatgaggccagcaggcctgctgcctacctttgtccaggggctgaggacatgtatacatgtctcagggaataggcacttggcttgacagatgctcacttaaaaggaggaagcgataggaaacagtcattacaggcaacagacacgtggccccttccttggaagtgctgggtggtctcaaatgccccccatcgtcccctctccaaccactgttgccctcacttgagcgtgtgtgatcccaatggccttgccattttcttcttcttcctaccagtccatccaccatctgaccacaaacaagcatgcttgtccacaagccatggtgcatataacataacatttccgggtacaggcaccaataactattggtcacaacccacacttatttttggaatctattggaaactccacacactcttccttgttcatggtcaaaggcggacgctgctatggggctcctcccaggaagtggaagtgcatggcacatgaaagttttccttacacatggatgaggcgtcaccttgtacacgcaaccagggaggggttacctcttatctgcgctaacctagatcagttcagagggtccctgtcttccaggtccgctccaagtggcacagaaccctgtcccgtttggcatggtgtcccaggagctgggtacagcctgtgcctatggccagggaaatagtgggggtggggtgctctgaggagcagtgtagctatccgttgtctaggagatcagatcctgagccagaaggccggaagctcgaccaggcaaagcccttgtgttcaagactggttcctggaggggtagaaatggtggatggagtttgtggttgtgtaggtggggcactggataagcccgctctcccaaagccgacgtaccgtaccacgcttagactgtgagacagactgtcaccatgtaaactgtcacttacatctcctgtacttccctgcccaggtttatgggcgagcctgctctaaggtcttgtaaaaaggtaggaatgagattcttagtccctcagagctgaggcaccacttctggagccctcccctcccccatggctatgcgccaccttgtggctgtatgtggaactgcacccagaggttctagtctggtgatagccaaagctgcctggtcaactgggccccaggtggcctgagttcgcctgcactcacacacagaaggcagcaggcaagcctgaccttctagccttgtaggaaacagacaggggtaatccccagggtgtgtgaagcacaaggctgtctatgaccgtgaccctggccaaggtcactgtgtcagtgtgttgggagctgcatcaggctgtaggaggaggagccctgcaacatgtcagacacagggtgggtgtggaaggttatacaatccttgcatgcgtagaggcttatgtaacccgtgtgtactgaggttacgtaacacatatgtgggaaatctggcaacatgtatgtgctgtggctgacagttgctaataataccttggatggggcagctcggccctttccctggctggttccaggtgcttggtgtcacaatgcatgaatggcgcctcagttttctgatttgacatatggaggccttgaacagggtcagcatgggttatttagcatgtgtgcatggccttagacattaagcaacatgttcacatggcagagagcatggcaccagtagtaggtgcctgtccaggggcttctacaacacatggacacatcctagaagtcatccgagaatgccctgaaaattgcatgagtttgtagatcccaaagcttattaccatatttgggtttatactgaaggctgcatagttattcacatgcgtgggtgtcatgttgcatatatatatatatatatatatatatatatatatatatatatatatattctaaaggttacatagctttaagaatattccaaggagcatttcagcatatttggcataaattgaaggcttaactatgtgagtgtcctatagattgtgggtgaaatgtgtatgtgtatgtggactttagaacgctgcttatatgtgagacatgtgtgaattttggagtctcatagcaatacttgtctgtgtgaatgtgttggggccctaagcataattttgtccccatttaagccccttatctctcccatgcagctaccagatagctggctagactcttctaagctttgtcagttgatgtaggggtaggaggtagactaaggacttaagacagagggagccagacatggagggttttggaacctcttagatgagaagggactgtccaaaggctaccctgtgattcttctcgctttgccccatgcagtgccaggtcaccagatggaaagcgaaaaagaaagaacggccaatgttccctgaaaaccagcatgtcaggtgagcctggctacacatgcccctctccctaccctcacccctacaagagcacacttggctcctccaaggctgggcctggacctcctatgtctctagagggaacagcctacagaacatgggttggatttgcataggggtgagaatggtgattcaaaatgtatcctggcctttaaggaggaattaggtcaggaagggcctctttcaccctcctataacctccccattgaaggttctttctgttctcctgggggggggcgtttcttctcctaactccctatgctatcctgtcacttagatgtaacattgaaaaataaaaagtcctagccaggccaagtgcaatggcacctacctgcagttagagagagctgtttgggatactgacatagaaggatcacctgaacctaggggttcaagaccagcctgggcaatatagtaaaacccaggttcaagaataaatacatacatggaaggaggagcggggagggccactgaatgggcagtcagaatgaagattccatatattagaagggaagggatggacaatcccccccactatatgtctccaggacttttcctgtctacttggcggtaaagaacgctttagtggagctgggctaagagaagaatgagaaaggcaaagatgggggtgggtgcagtatagaagttcctctaccgggctccacaccatgcccactgcctccaccctttcccccttcccagggtatatccctagttacctggacaaagacgagcagtgtgtcgtgtgtggggacaaggcaaccggttatcactaccgctgtatcacttgtgagggctgcaaggtatggacgagccatctcctgccccatccccactgcctgtgcccctttgagtctccacgcgtggcatgacagtcgatctctataaacacgtaacctaaagcctactcgttatatcatttttctcctcatgcatttattcattcatttgttcattcataatcctctcacgtgccatttgcctcacctctttgagcctcggtttcttcatttatgaaatgggattatgctacctttatcttagagttaataagcaaattaaatgagataattcacctggtcctgctttaaatacctgcagagggttgggaaaaggaatatggcagaggtaagaattataaccgtgatagagtcttcaaaatagtgccaagcacatccaagaatttcatccatccttgaaatgttctaggggtaaggggtgagcagccaagagtggtactgcacacttgtaattccaggacttgggaaactgaggcatgaagatcatgagtccctgggatggatggatatacatacatacatacatatatatatgttttttttttttttctgggccagcctcagctacataggaagaccctatctcagaaaaagaatttgcagcacagtagtgcacacctttaaccccagcaccctggaggcacaggcaagctgttgcctatgagttgaagccagcctgatctacatagagagtttcaggccagccaggactacacattgagatcctgtgtcaaaaagcaaaaagcatgagggatagaggatatgccctaccctcaagctacttgcagtcaaccaaagaagcaatctgcaaacaagaatcagagtctttcaaaatatggatcgtggaggtttggcaagatggccctgtggggaaagcacttgctgcctgagcatgaggatgtgagttcaaatccccagctcccatataaaaagccaaggatggcagcatatgtgtttgtgatccaaaactgtaaggcagaaacaggaagatccttggggcctgctggctagttccatagtgagaccctgtgtcaaatacaaatgagatcaaaagggcagagagtgattgaagaagacactagatgttgacctctggcctccccgtgtacatgcacatatatgtgtacacacacacacacacacacacacacacacacacacacacacacacacgggtggggggtatgattgattcctgggtcacctacagcactagttataatgcggattcccaggctgcatttgcccctacttagtcccaaccttattgtgctggagcccagaagtctgcttttaacaagcgccccaggtgatcccaatgtacctgaaaaggtgagaacctgtgctgaagggtcataatggggacatagaagaaaagatgaccaaaggttcttttctatcagagggtcaaaggtcacagacttgacaaagcctattagattcaacctgttgcaacctgtatggctctttcaggaccactgcctcctgcaaatacaggtctttccagaaagaaaccatttaaaagtaggtgaaaccagtagggatggtagtgtatgccaatagtcccatatacagaagatggaagcaaaagagttagaagttgaaggccaaggggtggagagatggctcagaggttaagagcactgactgctgttccagaggtcttgagttcaattcccagaaactgcatggtgactcacaaccatctataatgagatctgatgccctctgatggtgcaaaggtatacatgcagatagagcactcatatacataaaataaataaataaataaataaataaataaataaataaataaaagatttattggttatgtatacagtgttctgcctgcatgtctgcctaacagaggagggcaccagatttcactatggatgatggatggttgtgagccaccatatggttgctgggaattgaactcaggacctctggaagagcagccagtactctgcaccgctaagtcattatttcttcagcccataaataaatctttaaaagagagagagacagagagacagagagagacagaagaagttcaaggccatccttagccaaatagtgagtttgaagctagcctggctcacataaaaccctctctcaacctgggccatggtggtggcacatgcctttaattccagcactcaggaggcagaggcaggtggatctcttgagttcaaggccaacctggtctacagagtgagttccaggatagccagggctgatacacagagaaaccctgcctcacaaaacaagaccttctctcaaactaacgcacaaaggcatacacacagtgtggaaccctgaagtttttctctcctactgttggccaaaccaaaaccagttgagattccaagtttcatagcaatgttcctggaaatcgtagtagcaacaaagtcaagagaaagaatccttagctccaaggacatctgggtcccaggggaacatctcccaaagtgccctgtctccacttctagagtttggttttgtaggtctagaatgaggcccaggagcctgcatcttggtgcagtaattttaattcactccaggtctgaactctcagatcttaatgtcttccacagaaggcccagttctggtgtcaaggttaaatgtaacatgcatgaaaggcacatgccaagtgcacatcatgtagtaagattcaacaggaatccgcacttcacgttgttaacctcccgattctgcaggtttttcatttaaaacaaagactaaaacatcagattttaaaaaatttacagccagtgtaggtggcgtacgcctttaatctcctcactctggaggcaggcggatctctgtgagttcgaagccagcctggtctacagagtgagttccaggacaggttccaaagcagtacagagaaaccctgtctcagaaaaacaaaaacaaaaacaaaaattacaagttattaatgttcccactcagtgcattttcttgaatattgatcttcctattttataaatcccgtctgcacaaaaaaaaaaaaaaaataggcaaaacattgtatatgagaatgcttttggggtcagcattgcttttagagtcattaagcaagctaggcaagatattaattggcttttctagggctggcaacgcagctcttttggttgagtgcttgcttagtgtgcacaaaccctggggtccatcccagcaccacgtaaaccagctgtggtggcacttgcctgaaatcctaactccagaggtcagaagttcaaggtcagacttagctacacagtgagtgtgagaccagcttaggctacatgagactctgtcttggaaaatatatgatgaaaatttaagaatgatttaaagtagacttccaaggcctcataacgcccacaccagcccaggcccaatgctttctgttacattccctgctctgccaccacagacattcctcatccctctgcagcctgagggtaagggcatgtatttctcagctcctttggcctggtaggatccagcaatcctgggcctatagtgacatgtggatgccagatgacacttgcttcccgtgccccagtcttactcgatgaactgtgtggttggctcaggagaggaagtcataatggcgaaaacctgcttcatgtgtccccaccctagggcttctttcgacgcacgatccagaagaatctccatcccacctattcctgcaaatatgacagctgctgcgtcattgacaagatcacccggaatcagtgccagctgtgccgctttaagaagtgcatcgctgtgggcatggccatggactgtaagaggcacccatggggcaatggagtcaagcagctatggtggggttgagtataagactagcagatcccttcctggggaccttcagggcagagtggtgcagccctagtccaggtcaggctgattgtaaagtctcgatctcagatttgggatctggtgccctcatcccaaaggaagtgcaattcctgggtaggcttgatgcttcttgccatttcaggaccttagagagggagttgttaagtaaaaattcctgtgtacccaacctagcagggttcctgcaccccagggaaggcacatctaaatgaagagggggtatttcctcaactgtgggttgagtagaagggtcagctagcgactcctcataccataggtcaaaccagaacatggtattcctcaagccagcctatttagagttgactgggttccagtgattaaacatggtttgtattgtgccaccctattgctaagtgatttgggaagtcacttgacctttgtacgaggacaagcaatttctgagcatcgttgggggggtgggggttgccatgcaaagtgtcttttgtctgtcaacagtggttttagatgattcgaagcgagtggccaaacgcaagctgattgagcagaaccgggagcggagacggaaggaagagatgatccgatcgctgcagcagcgaccagagcccactcctgaagagtgggatctgatccacgttgccacagaggcccatcgcagcaccaacgcccagggcagccactggaagcagaggcgaaaattcctggtaaggaagcatgcacaccaagagagcagaggagtaagaaatcgggcacacccagagagcagaggttctactctcctgggagccttcttggtttaatccaacccaaacctggcgcactgtacctgttggcagttacggctttcttttctttttctttttgtaatttatttatttgtattgcacattggtgttttgcctgcgtgtctgtctgtgtgagggtgttggatcccctgaaacaagaggtactgacagttgtgagctcccatgtgggtgctgggaattgaaccgggctccttttaaccactgagccatctctccagcccccagttctggttttctacacctttgctttctggagcctgtctgttccatccagtgggatgctccatgagaactgggccttatcttcctgaattccaaggtagagctaacccacagggactgaggacagagtcaacataacagtattgtggggcacctgcagggctccaggcgttttattgaaccctcacagaacttactgccaagttgagggccggaaggcgatggaccactggggccaggctccctgagtatgctaagggatggaaattacactaaggactggttgtgtgactctggtcataccacttaactgtgctaggcttctgtctatgaagtgctgtcttccataaagatttgtgatgaggattaaaaggagctatgtaaaacagtgtggccagcctatggtctgctgccgtgttttcagtcgttatggctgtgttttattacgatttattgactactattctcactattatcagcactagcaaatttgaaatgctcgccctggctatccttttggaacacagtcatggctgggatttttttcccccaggctgccttggagctccccctggtgggcagggagtctcagtgagcagttgaaaggggtccacagccccagtgaccctcatctctctccctctagccggatgacattggccagtcacccattgtctccatgccagatggagacaaggtagacctagaggccttcagcgagtttaccaagatcatcaccccggccatcacccgtgtggtggactttgccaaaaaactgcccatgttctccgaggtgagtggcaaatggaaggagagacttgctagagggaacctaggatcatttctgaggtcacacagcctcactgggtattcctcagatattttctggacagggggtgattctcgtagcttgtgtatacacacacacacacacacacacacacacacacacacactccttgagtgaccattttacctccaggcagcatgactcatttcttcattctgcacagcactaactggaaatagactgttgtactagctgtgggatcttggccaacttacctaaatgccctgtacgtcagtgttttgaagaggactggaagaatgatgggacctcactcttgggcctaactgtggggtttaagtgcataagtggccatggcccagcaaagagggtggggaggttgtggggcatggagaggatgtactgagtggcctgtgctcctgttgttccacagctgccttgcgaagaccagatcatcctcctgaaagggtgctgcatggagatcatgtccctgcgggcagctgtccgctatgaccctgagagcgataccctgacgctgagtggggagatggcggttaagcgcgaacagctcaagaatggcggcctgggtgtagtctctgacgccatctttgaactgggcaagtcactctctgcctttaatctggatgacacggaagtggctctgctgcaagctgtgctgctaatgtcaacaggtatcttgccatggctgagaggtcccagaagctctcaggagctctagagtttatttacacctaagggttcttgctttcccctttattgatcttgcataggcactgtctcatctcttcactccccggctccctctctgtttatcagtccctcctctgccccctagtcctatattttaattattttttttgtcctcgtgtttggtctccagactatttattgcttttgatctccaaccttctctctgcctctgttccccctctgcctccagttttcctctcttctcaatgccatctctgtttctccacccgcctcatggatcgcttcctcaggttcttaggggccttcctgagtcccggtcacctattcctaccaggttggcctctaactcagaaatctgcttgcctcggcctcccgagcgagcgctgggattaaaggcgtgcgccaccactgcccagccttgatctctcctggcgtctctgcctcagagtcccttcatgccctcctgaatgtttcttctgcatttctctcagaccctcggtattcatgcctcctgctttccctccctgcagaccgctccggcctgctgtgtgtggacaagattgagaagagtcaggaggcgtacctgctggcgttcgagcactacgtcaaccaccgcaaacacaacattccacacttctggcccaagctgctgatgaaggtgactgacctccgcatgatcggggcctgccacgccagccgcttcctccacatgaaagtcgagtgccccaccgaactctttcccccactcttcctcgaggtctttgaggatcaggaagtctaaagcctcaggcggccagagggtgtgcggagctggtggggaggagcctggagagaagggacagagctgggggctgagggagaaccccccacctcttctctccttcctcccatccttggatagatgcagctcccatatacccctgcactgcccagtccccctcagaacctcctccagcccttggacagggcaacaaatgaacttgctatgaaagacagtgtgggaggctggggcctaagtcctagagtttctgggaccctaacctctaagaaaataggggaagggaggaagaaataagagggacaagccatcctgattgtagggtcaggaggaatgaggaataggggcagatgccctcactcacccctatatacacaggagagccctgccaagtttcttggcctagattcccttcaggccacaggtctctacttccccaaatacctgggtcctgggtacaaaggacagtttggcttggctcctcccctggaggctaaaatggtagtcatccttactgcactttggaaaccaagcgaggggagaatataaatgaagaaaaactagacagaaaagacaaaaaaaaaaaaaaagacaaaaaagagaatgttagagagagagagagagagagagatgatattaagttattagctgaggctggcccaaggggaaggaccccccccccttcccacccccatgcactttgagagctgcccttctgaccccagagagaaatgcccccagcagacctacaagggtagggctgctgattcgagctgtgagatgacagaacagggtcctggcgcccccttgccttgcccccaccctgtgcccctttggcaccgcaccccagtacttcctctgctgtctgccactcgtgcccgctgagtgccatctacctctcacgctggatgccagctggcccctcaccagcctgccctgttgcccacacagctcccctttcaagtgcccagccccaggggcctcctgtctccctcctcctacaccttggcacccacacacaggaaaaactgtggcccaggctccttccctcctcataccctgcagtattagctacaacccagatgctgctgcaagggggtgggggtgggggtggacatgtgtgtctcccagaacctccgcctctgtgggactctgtttcctgtctgttttctgggctccctttgccctccttagtcccacttgatgcactaacccagacgtagggcaggttggcacgcagtgggagtttctatcagtggcacttaggggcccaggggaggaggcatttggcactcctcctgttttctttgaagctctttaggccagccacccctctgcccctgggaaccttctcccctcttcttttctaattcagggactttggcttgagccatctcccaccctctggtgaggagtgctctgttggtctgcgcttgggtgagctgccctcctctcctccttctcctccctttggctacagcccactcctctgcagagagagggagggaggaggtggccctcccatgagtgggagggatgggaggagagggagaaacagcagaccagtggccctgggctcagggctgcatgtcggcagggatggatgggtggacatagatgccccccggaagccatggggaatggggcagggggcgggggaggggtgccagggcttcctgcgctttgcactattggggcaaaaatgtcttaagcagtggggaacctgccaccccactctgaccctcagcctgccacagcccctacacacacacacacacacacacacacacacacacacacacacacacacacacacacacgaggaaggcagtgcttcactgtccccagggcagtgtcctctgccactgttcaggtgttccaactgggcagagggcctggaggagcatctcctgtcacctgtgcatgtgcctgccccaccccttggggcccctgggccacctgtgctatctttgtctctatcttctttctctctcctggggtactgatttccatattcctccagtcccatgggtaaaccctctcataccttcctcctataccttggggcccagtggagttcctgacctgcctgctgtctccctcctttccctggctccactcctccttctccattcccgttctcagccatgggcatggcctcttacaggcacttgggaatccccccctttccccaagtcatatgagctgtgagccccttcccctcagcccttccccttcccctccccttcagcccttccttcccctcagtgatgtggagtgtatgtgtgttcctatgtgtgattgtatgagtgagtacatgttgtggggaggagccagagagactcaggagtgccacgcacctgctctagagaggcagctgtcccagtccctgctgtggaagtgggggacagggccctctcctgggggccattggtgctaatggggggttggtcttggcatgggtgcttagcatgccttcccccaatgttggcccggggcactagggcaggccaggtggggcagcaggtgcagtattgatgggaggatgggttgctgggagaaggatggggggggccaggccaggacaagggggtgccagagccatgaccactaccctgcccctaccactgcctctccatctcagtattcccccctcccatcacttataacacacatacctcatccagcctcctccctgctcagacttggggagggtgggggaggaggagcccctaccccttccccgggtggtgggtctatagggctgggagagggcagggcagggcgtgtgacatagacaccgtccattagggggaacgtacttcctgccctaggaactcctgggtggagggggacactacccagaggcgctactgaatgtatgagaagctggtgctggggtgggggtggggggttatggctagaaaacagggaaggagataggtcccttccccagagaggggtgggaccggtaggggtgacttgaggggctcctactcctgccccacagttgacaatcagtatgtctgttatgtgcgatttttcaccccattgtgttttgggtcaggattttaaagaaagatatttttatggtaattgttgctcgtctattttactatatatttatgtaataaatatatgatgaaaataactcccctgggcaccccccccttagacttgcgtgctgttcccccttattctcccatctgctggcagagtacccaccccacaagctgaccagatggagaggtgccccccccagcctnnnnnnnnnnnnnnnnnnnnnnnnnnnnnnnnnnnnnnnnnnnnnnnnnnnnnnnnnnnnnnnnnnnnnnnnnnnnnnnnnnnnnnnnnnnnnnnnnnnngagtggtttaaatagggggggtggggagcatggtgatgggggtgggggaagagttatttacaagaaggctcagggggccagaggctcatcttggaatattttataacaatataaataagattctggtttgcttttccttttcgtctcgtaaaggagagagaagtgcagagttcgattctgtacaagggggcagcggcagaaggccggccgggcgggtcactgggcgtccacccggaaggacagcagcttctcggaatgcatgttgttcagggtccgcaggtccggcagcttgagcagcagcttggtgaagcgggaagtctccgagggccggttcttcagcaccagagcccgaagagcccgcagcagcgtctcctggagctgctccaccgaagcggaattctccattcccgagcggtctgtggggaagacgacagcagtgaggcaggctccctgagctcctcctcctcctctgacgaggacccggaggtctgcgaggacctggcaggcaaggcagcctcgccctgaggccccttggagggtgatgggggaggaaaaggagggcgctactcctcctcccaggcctctgccccagagcagggcatgcccaaatgctgggagcaaggccacaggctggccacctcccacccctcaagaccaccctcctaccccgagcaagccacatatggccaagctcccttgctttttgctctgtagtaccccctgcctgggatgcccttcccccactatgcctggcagttatcttgtccctttgaggccctactcaagtgtcacctccttccccagctctcccaggcagaaatagttgtctgtgctttcttggttcatgctaatactgtgacacttatctcactgttttataattagtcgggcatgagtctgtttcccaagctagactgtgtctgaatcatgtctgtaccccagtgcccagtgcagggcctggcatagagtaggtactccataaaaggtatgttaaattgaactgcgtgtgcctcctccagggtcaggcgagagcttggcctacctgcagagacaagcaccacagcggtgaaaaggcccagctcctcctcggtaagcgccagggagttgagcttctcgctgaagtcaaacatggcattgagcaggtcgcccatgcccatggcaccgagctcctgcagactgtaggttgtgcggctcaggaacatcactgtctggtccttcacattgaacaatgatgcaaaacgcaccatcaacacctgaagggaggacaggcattttgagtgaggagggaggagcatttgccaaatgattccctacagtttcccccaaacttcaagggtgtggccttagattgccagtaaggggtggcctctgaatggccaatggtggggggagggcccaggtggaagtaacaccagttctgggatgtgcatctaactaaataccatccatctgccaggtgttactctgatacagtgagtctggagtagacactggcttggaggacagaagccccacatacccagaggcggtaatgggagttccacctcctccatcagaaagaacacagttccaaagtccctgaaccccttccccaccctagtcactgagctattcccactggctccttcccgtagttaagagcagggaacatcaagtattgctcacctcaaaggtgccagccttcaacagggtcacctggtcatgctgagaaaggtcacggaagccggggatgtgcttggcaaactctaccacctcacgcacagcaggtgtgaagctcattgagaagtcttcccagatctcctgcacagtccggccactgcgtccatggggatacatgttcatgggacatgcctatggggacgatggagttaggagggccatgtcagccaggtgggctcctcacctgggctcccccagcaggactactttccaggttctgcctgggctaagagctatggcccctgaggatgggtctctggcttaaaatagcattcaggtgttaagtgacgattaagagttcccagggagaacccaggtttcagggtcatttcctgagcagagggtattcccaccatcgccagttcccacaaacagctgacaccacctgccttcctctaggtccagccttccaggccccctccctctctctctccacattggctccatgccctcaccagcagaacattcttggtgttgccttgccgtagaccgttcgcaggcgcctcgccttctgaggccgagtatacgtgggtggggcacagacgatgcccattgctgttgggttggtggcagctgtgatgggcagagccagagggccaggtaggagggtaggaggaggggccctggcatagaccattcagtgtttcattatgacgctgagccgccaaaatattgttgtcgttgggggcaggcgggcatccctgactttcccagcggtgtggggtagtagctgaagggctacctgatgcgtgattggcattgaagttgccaggtgaggtgcctaacttgtcatgggcataggtgaagatttctcgatgggcccgagccacctgggatatgacatcctccacagtgggctcagggctgggggatctgggtggtgtcagctgttgtgggaactgagagaagcccaccaaaggagtgggggctggcgcaggaggggtcgaggggcctatggaacccgaggtgggatgtggggtaggtgaggtctctagaggacacaggctgctcagttggttgttggccaagttcatggcgctctgcatctcagcgagcatccgttgcttctctctcttggggatgcgcccaaaacgcacagctgcaacaggatgagagccgtgtcaggaagttctcacatactcacatgcctgcctctcttccttccttcctcctaaaggggtaagaccctgaaagctggagttccacttcagaactgaaaccaacaaggccacgcccattcaaaggatatgatagtagatggatggggggggcggggcacacacacaagcgtgtttgtccaagagggttaacacatgggcaatgacattcgcagtatcacatgtcagaactcaaggctttttttccccccccccacggggaggattaaggtagaaaatgggtggaaggatatggggcagggaggagacatggggatactgccttaccatctctagacatgccaacggagagacacttcttgaagcgacactgctggcatcggttgcgattgatacgaacaatggagcaattctcatttttcagacaccgtttgtactggatattctgttggatgctccgacggaaaaagccctggaaggcagggtgactagtgaacctcttcatctaagctgagcccctgcatcatggggggaaggcatcacctgcctgggtcctcaaccccaacccgcctcaccttgcagccctcacaggcatgcacgccatagtggaagcctgaggccacgtccccacacactttacacagtagcaccatgccattcagctctgtgggaggagacaggcagagggtaagcagagaggcctgagtgacctgagatatggaggctttccaggctgaagattgtcagagggaagggctaaggaggaggctgctgtgtctaggaacactcaggtgactggactggacggaaaccagtacaactctaaagagaaatcccaaagatcagggcatagacctgaaggtaactgtcagatggaaaccaactatcaactgaatcctggctcaattcctttcccctaaatccacagggcatttactcactggtaatgttgctggtgcctttgctgggagacactcggctgctgtcctccatggccacttgtagacttcttggggggctcccgttatagaaggaggaggaggaggaggaggaggaggaggaggatgacgatgatgctgaagaaggggagctatcatcactgaggctgggtggtacacttccaaaagagcgggcagggtcctgggtgagggagccggtgggagacggtgggaagtatgccggacaaccttgagtcagggactggaagctgccattggagctgtcactatagagggactccgggctggtccggctgggagaggagccactagagccaatgtaggtgataacgccacctagtaagacaatgcaagagaagggtatcaaccatcatgtgtggttcaagggcaccacctgctcatcaccaaaatactgctcttagaagttatgcatgtagaacccctaagcttgggtaataaacaattctcccacacacactaggtaggcatggtcaaccttaagaaattctccatcacctactacatgatagtcaacctagtcacaagaaacacccatagccatttatttgcacaatacattcaaattctgctttgggtgaggcataacccccactgggcatctcatacatgggaacccctgccctagatattttcctgagggaatactgactgcagctagtaacttagttataaggggtacacttggggctgggatgggcagctgacagccattcacaaataaacctgctgccaattatacactaacacctatccagtgatggaccatgaagagtggctagccaagaggtcatactactgtaagacagtcaccttcccttcaaacccaaagacattttctcatagagtaaggaacagcctggcgcccctggcctgcaagcgatgagtcacaatgactctgagtccaagaaagacttagagatatgagctgcagaagatacaagagaggaataaattgtccagcctggggatttaggcattccccctttcgggtctcagccagatgatgactttggctctatagctccactcagggactttgtccctatggctacaccgccaaccaggtggttctgcaggtatttgttctgtggtatttgcagaagagaaaagtgacttgcttaccaaacctctgccaagcactttgcttggcctgccatgggtggagtggggaaagggaggatccccagacacgtgtgttcgctgacacatgccatgccaccgtgtctgcagaagcacatgtctcactcacccactgacacacactaaactaggcagggcaaccttaaaatagctcaaggttggtcagggtgaacccagctgcccataaaatagttgcagaatggctaagcggctactgtttcacggctggggtgggggatgggatatttatgtggacctaaatgaacttgacctagtttatccatcctgaaagagggcatgagaaagtcactcaaaaagtcttccaactttgaagtgagaggcactgctcaaagaccccagttctaaatctagatctgtattactaccaatttgctttccaacctagaggaaaccaacacttcctcttttggtctgttttcctttctgtgagaaacacacacacacacaccaacaaaaaaacagtatgacggaaagaagtaggctttctgctctgatcctcagaaactcatgttttggcggagaagacattcatggcaggcaatgagggtacttggggaacagttaaagactttgggaacgaacatgggaaaaagctgagtctaaatgcagtaaaatgatgttagtgcgattaaaataaaggggagtaagtatgaactggtgtgaggtctcgttgggacgcataaacttgaggccagaacaagtcacaggggtggccccgtcttagtcaagtctcggccatggagggtaagaggaccaggcagttggagaggaaaagaaagcaggcgggggcggtgagtcagcccagcttcacccagatctaggtggagaagggcggggcgggagcctggccctcagctggcctcacgtccctgctccacgtgtgcccctcgcacgtggctccccaacgaggaaccccggaactcgaagcaccgccttctcttcccttctgtcgcaagcagaaacccgccctcaccccgccccttcggcggcgtcctgggtggaaggctggaccctaaaaccaagctgggccgggacaactgaggggaggagagaagggaacacgcgttgctcaggcaacttgaggggcggagctcattatgtaacgaggccgggaagcaatgaccaatgggatggtggccacggcttctactgaatgaaaacaaatgcagcacgtgggcccggctctgcagccatgtgagccctccccaggttcaggcgctgtgggtgccctgcctggagatgagccccaagcacccgactcctcaggtggagttccctactgccactgaggattcccctgtaagagctgacccgttccttcacaccctccagtcccacagcttcccagactccctggaagtgggctagaacttgaaagtgaaaagcgacaggcattctacagcagcaagggatggacagatggggaggttccccgacactgcttcaaagcggtccgtctccctaaactcttccacttgccacgagtatccaccctctgtttcatctgcccaagattcaagttcctgcggctcaggggaattcggaggggtagttgtgatgattaggctttaggcgcattaccagccagagtaacccgccctggagatcgtacctaatggctctcagcacagtagcaaacaccggccagagggaatccccaatcctttacaattacaaagttcctctcctaagccgtggatggaaatggagacagtgacagagcaaggataatgataagaatcttagtacctgtgttgttgttggagtccagagtcgtcatgtcttcaccggctgagagcggtcattcaaactggaccttgacacaaactggaggttgcagtggtctctctcgccccctgggcaatggctgagggagacaagtggaccccgcggctgaaaatcaggattccaggcaccaagcaataaggttttggggtggccgggctgcagccctgcagaagggtaggacgctgaggcaaccgaggtctgatttgcatgggaagagcagagagaatgtgtgtaaggaatcagcctgcagcagatctggctgtaaggtagcaaggagggtagggtctctgcagtgcaccgatgccactcctgaaggttccgcaacactgcagggtagcaaatctggagcttcgggtgcaaaagtcccaaaaggagagaagctgcaaccaggaagtaagtaggtggtggagaaacgaggcacccagacacacagagagacgtgtgccctgctacgttccctcagcagtaatatttcactctgccaatctcaaccgccttttgcccgagcctttccctgggacagaggactctgcgcaggcgccagcagcccagggttcccgggccgcacgcggcactggagcaggtaccatgtgattccagggagcgcctcgtgccccagtgacacacttttccagcagccggcacgttgagctctatgcggctgcgcaccgccaagattgttgggatttgtagtctactgacaaagtaggcggagtgcgtctattcccccctttctgctttgcaaaagtgcttgttggcagcagggaggagctgaaagtggactagggtggagttttctgaagagtcagggtggcgtgtttggaaagccttgtatggcaagggcatgtgaattcctggggagggcctggcaagctttactgctctatgggagatcaaagctaaaaggctctttttgcaaacctagcaaacagcaaacgtgagaccttcacgtgattgcagaactgacctcgccctgaggttattggtaaggggggggggagtggggaacacgggacacgggacaacaagctgaggaaggagatttccctggagtcaagaatttaagctggtttttgctatggtgacaaggcgggatagacattgtgagtgcctttcacttacaccaccccccccaggaagaacacccgcgggaaaggaatgacacagatagagtggggatatccctagggactccctgtttgcttatacgacaccacactgcccactcaactgactttggggtgagtcatttccctttatctgggaaataaaaaggacaacagagggatacttcatggtgaaagtgctttgaggtcctaatgtgaaggggtctgctcgtgcgtgcggtacatacttcgtacttcgtacttcatgggggcaggagttcacagattaccagagaggacacgaagatcatttaatccctcctcccattggcagtgtgtgctggctcgtgcctgcaatcaccgtacttgagaggctgaggcaaaaggactgccatgaatttgaggctggccagagctacatggcaggaccctattggggagggtttggggggcagtcatcttccttcctcttaatgaagaaggaaaagaaggggctggcccaaggccaagcatacactgctgctttttttaaaaaataatttatttattcttattttatgaacattggtattttgtctgcatgtatgtctgtgtgagggtgtcagatcttggagttacagacagttgtgagctgccatgtgggtgctgggaattgaactaaggtcctctggaaggaccactgagccatctctccagcccagcatccactgcttcttttgtttgtttggttttggttttctctgtgtaacagctctggttgccctggaactcactctatagaccaggctggccttggaactcactctatagaccaggctggccttgcactcacagagatccacctgtttctgcctcccgagtgctgggattaaaggtgtgccaccacggcctagccactgcttccttccttctttccttcctttcttttattttcgagacaaggtttgtctgtttaacagccctggctgtcctagagctcactctgtagaccaggctggcctcgaactcacagagatccgcctgcctctgcctctgcctcctgagtgctgggactgcctggcagctttctttttttctttttacctgaaagctttcttcacttgcttttaggcagctcaagagaaagaagtaatggaattctgggaagtagggcagccacctaggaagcagagaaaagcatattggcaggctggtggtttgccctgggctatttggtttgaaacttaaacaatgagtgagccccccccccacacacacacatacacacacacctcaaagctggaatgagggcaccaaggaaaaagtaagctgagggttaaggccaatgatagtgactgcacagcaggcttggccaccgatcctctgaaacctaggcttcagctctgttccctcacacctaacaagagtgggacagacaagaaacagcaggcttttctctggccctgccccttgagccccaagcaaggaagctgttgcagagcactatgggaggaactgggaggagctaagacaaaggaggaaagaggctttccaggaaaacttggttttgaactcaacctccactccttatccctcctcccactagactgtgtggaagaactgggaggtgaagctgctctgtccctggctccctgctctgagtgaccttcctgagtgggtcagagccaggggaccccacccaggtatctgtcagggctgttcaaattccaaaatcccatggtgctatctagaccctccaccccaccccagtgccagcattgcctctgacatggcatgcttcccttagttgctctgtggcccccaaggcactctgtctgctctgtgtacagctgttgtggtcctgcttttgctgagcatgtttccatatgaaggaagggccagagatcaagactcccctggcgtttgcagccagtgagaaggcagagggaaccagagctgaaattcattcagcctaatcctgctcttggcaagaagcaaagttgttttccagtctgtgtgaggtatgaaggcagaggctgggaggaagggagggaggggtgctgcctctgacccctgtttcctctgcacttcacatagggctctgccttttctccctgacaaagagccttttttttttttcttctgagacagggtctagctcaatgggatggccttgcattttgaatcttcctgcttctgcctcccaagtgctggggttgcagctgttactcatacacccaagtcaaagaagtgactttggatattccttgcagtggagatgaggacatgagcctacttcgcactctctacctcttttgtgggattcaagggaataaaatgaaaggttgggctttttcttggttctagaagattctaacatgtaaactctgcttttttctctaccagggacttctagaagaagagcagaggaaccaaggaaccagggaatgtgttgtctcacccaagggagactagagtagaccgatggcttttctttggcttaaatcttagcttaagacaacaggtgtaggggctagagagagatggtttaatgcaacacttaagagtgattgctgctcttgcaaaggacaagggttcaatttccaacacccagcatggcagttcacagccacctgtaactccaactccagagaatctagcacactcttctggcctctctgggtaccaggcacatacataaatgcaggcaaaacacccatacacataaaataaaaactaagttaaaaaggcagcaggtatagttcagtacaatctacttatagccagtatagcggctcctcatgcccataatgcaagtaatgtagaggctaagggaggaggattactatgagttcaaagtgagcctgggcttcttaagagttccaggtcactacagtagaagacctgtctcaatcaatcaatcgattaatcaatcaatcatcaaaaactctaccaaaacaaaaacaaccacacaacatcctttgctctcacaccagctagacagtctagctttactacacacacacacacctggcatgcacatgcacacagacacatatagagtcaattttagctcccaagagaccagattcaacgaacaacactccataaagtgcagcctggctccatattgtgtgcacctccacttggcttctttgaagtctaggattctgaggagtgacctcactatttggaggctttgttggatcctctgtgtttgtgttttcaactgtgtctttagtttccccaggattctctgaaatggggatgacatcagaaatagaaaaacagggctggagaggtggctcagcagttaagaacactagctgctcttttagaggacatgggttcagttcctagcacttatatagtggctcacaactggtgtaactacaggtcctgtcgatctgaagtccccttctgctttcctcaggcaccagacatgcatttggtatacatacatacatgcagacaaaacacacatacacataaaataaaaataaatttttaaaatctttaaaaagaaagaactagaaacaggaacaagggctctaagctctggtcagagcttcttggcatgcttttaggggactggggtttgattatgaatgtaaacagcacctttacatgtgtctgtgtgcagtgagtccatgagtggctgagtgtttgatccaagatctattctccttgacagtaggttggttgttctgggtaatagggcaacaccctgtgcaaatcttgagtggcctaaatcttggtcagactgtttgactgactgactgagggtgggtccctattgaaaataggtcaggcttcagttaggtaccttcccatccccctcctttctcattgggaacccattatccagggtaaaaaacctgttggcccagatgatgcaaacctggaatagaaacccagagatgcccctgaatcagggaaccagacatttacctaaaagaggttcatttcttaccttcctgaatcattttcctggtttctaaaaggccagctagccacatccaaaatcccaccatttggggaggacctcaagacaggagagacaaattctgagttaatttgttatgaaaccttgagaaaagaaaaggcaggaggcagcagcgctgacggggttcaatggatatgtttgtcaccttttccccactacaattctttccacagaaatcacacacacacaaaaaatcgtattaagtactaactgtatgccaggcattgtgctaaggaccatataaaagttctctctactgggcagtgatgtcccatacctttaatcccagcactcaggaggcagagactggaagatctctgtgagttccaggccaaggccagcctggtctactgaacaagttccaagacagactccaaagctacacagagaaaccccatcttgggaaataaataaataaataaataaccaaacaaacattctttcctttggttttcatagaaattcagtgctgtagaatacattggggtttttttgtgtgcgccccacctacacacaccgtggagatggggtttctggctgtcctggaacttgctttgtagaccaggctggcctcaaactcacagagatccacttgcctctgcttcccaaatgctgagattaaagtggtgggctaccaccccccggctgtagatcacattttatattttggagatcaggaaactgaagcttaaagatgtttattaatatggtcaggatgccagaagggactaggagagctgtcttgaagctgtatttacagaacactatcaaagaatgacagagttcgcagagattattggaagcacaaaactccctagccctgcttggaacagccactatctgtcactgtcaataaacatggcagtgctgggggttcagcgccaggcctgaagaagaaattcaactagcaagacttgccctcccagagagaatgggtcctgctggggatacgtccaagccacataggcatactgagccctgtttcccaagctggggtgctgctgggaagggaggtgtagcatcaagaagagaaacgtctgttccctcccacacaagaacctcagcttcccagaacctctcctttaactccagcatttcgtcttcccttaaactcttcctccatcctacactcccattatctggtcgtacgaggtagaaacagatcagaataggatgcaaaaaccaaacccacccaacccaaccacccaataaaaacaaaacaaaacttccacatgggctgctctagaggcgagggactcaagcagacagatgagctctggactccactcaagtctcctaattataggggccacagctggtgatggataggggaagggctgataggccaggtacttcctttaagagattattgaaactgggttcacccaggcatggtggctcacacctttgatcttagcttgggaggtagaggtaggcagagctctgtgaattccaggccatccttgtccacatagtgagttccaggtcagccagtgagaccctgtctcaatcaatcaaaataattaatcaattaatgagttgggtttgctgaaagtctggaaggccatcaaagacagagagaaattgtcacatgaccctaagaaaggacaaaactggcattcccatttatctgcctgagaaatgtgtacctttaaagccaccatccaggatcaattacacctcagtgctttggggactcaaaggagaatccccttctttgagctcaggatcttagtcacatcacaggatcctggaggagtcctacattgtccttagcaatacaagacaagctccaggtgacccttaatctggtgaagagcccaccttcctagctagggatacagtgctagccagcatgtcatgcagacgtctcctgtccattctttgctataccattgctgcagcccactggtgataccatctcccagcctcctgtaccagacggagctctggctgtccttgagttaagcctctgtggattgggatgcagagaagtgtggggtgtgtgtctgagtgagaaggcagggtgcctctgtgcctgccttatctccattctaagctgcatgtcaaactctctcctgatccagcatctcccattctttgggcctttgcagatctcagtgcagctgtctagggaagctgctcatgacagtcctcgtgacaaggatggacttcggaggacctggggcctgggcaggcattgggggccctgtgtcgcttctgggaggcttacataaacactggctgggaagaggagggaaaggagggtgcagtggactgcccagaaaaagaaaagaaaaaaagcaacccccgccccgccagctcagcctgtgtggaaagaaggaataaggctcacgttcggtccctcctcccgcccttctccactggttgcagctgttggttggaaggtctgcagtatgatgggggagggaggcaggggaaggagagagaagatgctacttcacaaattcaggatccttccccctcctctaaatcggtgcggggggtggggggccgctggcaatttgatgagattttcaatgcggcaggaaggagctttggctcattagaatgcgcagtttgcacccttgggggggggatgtgctggttgcaaaaatgcagacgtgtgtaggggcccagaagagagattttaaaaaataaaataaaaagcgccagctctgcaatgcaggatctgcaaagtttttggtgtgtgaggaaatgtgggtcgtgctcatttcaattgcttgttcctgctaacctactgtccgcttgactccagcagagcctcacctcgcagcaagaggcactgcggtgcagaaacggggtcaccagtgggctggaagtaggggctctggggttacagtgcctgtgagcgggggcgagggggaccgctgcagtgaggatgaaagctaaacttgtcttttgccccgttgctgttctgtgacagcctttctaggtctccagtcccaaccacggactaccaaagggacttacccttccaatccaccgtctccacagaccccgcccccacgacccccgctgcagacctgttcttagcttcctgtcccagacccacagatccctgattctctttgttctaatcctgagtggacactagctgcacgaacgtgtagcatcctccttcctagaaagaggggacccagaagctggtttcagaagcccaggctgcagctaaagcaggactcagcttggaggccaggaccccacttcataaggaggctgggatgagagatgctgtgctcttgacctggatagaccctttgttattggggggggggatctgggatgtctggtaggtgagcatgctgccttgctgatgactgcgctcgctcccggtggctcgggagagaccaaaaggacaggagcagaatacagggcaggagacgaggcggcctagtggcctttcacttcttcccccttctttccctcctgcttccccggccactggaggacagacgagtgtgtttgtgccgtcttgaagctcacgcgggctgcccgggtcacatggcccgggcatgtgcagcctgctccatttctaccacaacaactcgctcataaacagcccggctgctgcggcggtggcggcggagacatgtgcaagcgagggggtggggcacgtggccctgcccgagccaagggaaggactggattgctcagcgctgcctccacccctgcaggcactgggctgcctagccacaggaaattcctagtgctccctcgctgtagcaaaacatgttttgggggaagtgactttcaataaggatggagtcaacgaactaaataaaaacgagcacagataaccagtcctagatagacatgcttgcccttaccttgcgtggtggagcgtctgtgcaaaagtgaggtactcatgatgctcccagcttccctcttcctatataaaattggggccaaccaggtcttctgggtgaatattgaggtgagggtcttggattcactgaggcgaccattctcagatcagtaatggagattatcagcctggaacccctagagaaatgcaaattcttagacccaccggaggctcactgactcaaacgctggggacagctcgggaatctggtttaggacgccctccagggatccgttgtgtgagggaaacacagcgctaggtctgagttctctccaggagatacagccatgatcggggatatttttacctttctccaatgtggggcaacatctcagagttcagccagcaagcatagtcagatttagtttgactccgtgcaaaacccatttatcgggttcctcctgtatgccaggattctggtaatgaggacaaatggcacacactggtgggatagtgagtgtctgtgttctccaggggagtagcatgctatctgagggagaatgaagcagggagatgactaggtcctcccttccatccccttcttcccctcatacccttgttctgagtttcctgttgaaactactaattagggggccagagatgcagctctggcttcaagtctccgcacaaagacctgatgaggtggcagaccttaggacctgcctcagccctggcgggtagcacacctttaatccctgtactctagagacaaaggcaggggggatctctttgaatttagggccagcccactctatacatcggtaccctatctcaaaagcaaacaaaaaacaaatcaatgctccccccccaagaaaagcccactaagattgttattttgtttaagtttaaaaatataaaacgcacaagatgggatgccagaatgagagagacattaaccacggagtttattccaggtgggagagggggagagcaagagtgggggagtcgagacagagagagtgtaagagacagaaaagcaagagagacggtgtaaaagtaagagaagagagcaaagagcaagagagtaagtgggcaggagtctgtcttttaaaggggtcctctacaccgatgggcagacttagttctcatggaacgctgggctgagcaggccagcatgatgcttgaacctttcaattgtgatttaatttttttgaggctagaggtagaattgttttccttatttatttttgttttgtctttcatctattttgttttttgagacaaggtttctccctgtagctctgaatgtcctggaactcactccatagactaggttggccttgtactcagagatctgcctgcctctttctctagtgatgggatcaaaggtgtgtgccaccaccctctctcatttatttttattattttagttgatgtgtatgagtgttttgtctgtatgactgtgtactgtatgcatggctggtgtctgtggaggccaagagagcaatgggtctcctaaaactggagttacagatgtggataatggaaattcaacccaggtcctctgaaaaagcagccagtaatcataactgctgaaacatctctctggtcctccctcttgtttttgccaggcctggggatcttgagctaggtatggtcatagacccttgattcctctgtgtgaaacttaatgaatgagtacacatttgcccaaactcatattgcttagttctccagggtaagaaatggtaggaggagccaagaaaaggatgagaggcttggaagttccttgggacctgggtcaaatgagtttagcagataatgaacaggaaaaggttttcaataggagagggtaagggatagcaccagcctaccccaagacccaaaattgtggtgagagggtctcaaggtaaatcacaaaggctcctgagaatgaaagctgagcctggaatgccactagagagtggaggaccagagtctccctccttacataggcacagaaagcaagaagggagaagccaagaacaggaggttcccaggcctctttggctttccctccagcacagggagctagtcgcaggctccagcttctgttagactcagctctgaccacttgcctccttcgttctccctgctttcctttctgaacaatatatttttatctgaatctcatagagctttcttttgcttctctgcaagacttcctctgggcctgaaaggctctgggcccaaggagcagacagcgctgcaggctcagctgcagtgacctacattggctctcccctaggcctggggtgtgggggctgaagtttccagataggaacttgggaatctggcacaggtttatagatgacggtggcagggcctactgcctgcaaaagtggcactggggatctgtgaggcaggggagagggggcaccagactgaattctcactctttatatcggtgccttggtggacatatcagaagattctcctcccacaaatgcaaaaactattcttgagctgtgcccccctcagtaggacagagaagtccctgtcggacctggcctctatccatgggatctgaaagtggttttttgcaggctcttcattcttgctaaatgcatcccactcagctgcatcaggctgcaaagatttccttggtcttgatctggatgaatgagttcagatttcagctgatttatttcagagaaaatggaggccgagtcaaggtcgggtactcagaaatcggcttactcctgggtttaactatatagagactttagacccaaggttctgtgaaagaacttgaggggatgaattgtcactaataattgatggcttgagaccctgacaaccgaatccctcctcctagacggggaaggcaggtcctgaaataggtgtcttccctacctattgtgagccatagcgcacagggtgatcacccgcctccacattgtagatgtttttactcagcctaggaaatcctattggggtggagtggggggggggaggaaattaaactgtggtcacaaagagtgacttcagagcctttcacttagcggagacgagtgggggaggggagacaggctgtgcaagactgggtgttattctttgcctgaacctttcactgggtggctctgtgtccaaagggcttccccttgccaagccccaccccaaagcccaggaagtccaccgcttggcacctagccaaggcagagcattcctcaaccttcagaccggctgtgggatggttcccacaggaggagatgggaggggaagaaaatggtcagtgaagaaagaggtgaccctagtgtgtggaaggtgggggtgaaaggtcagcgttagtttgcagtgccacgagcccccgttagtggagatgagattggatgctttccagcggctatgccaggggtctacagactgccgagcagaggacccttgtgtcaactctccgtgcagggtcatccttgacgtcctaagttgtcctctacaagctacttcagtttgcttgttgtctctctcccttactctggttgagcttgggcgcccccgagtggtcaaaagcaggaactgcagttgggctggggggaggcgctcactgggtctccctttgcctctgcccctcccttttcctcagcctaagccctggactctggaaatagcacctggtaatgggagcgttgacagatgctgagttataggagagcaagtggcccagccagagatttcagtcttctgacttgatggctttgggactctttcccttaaaagtagatgctccaggccaagtgtgacaatagatgcctgtaatcccagcccttgagaggtcagggcaggaacactgggcattccaggctggtctgagctaatagtgagaccatgagaaaaatggaggaggattgtggtcagtgtgatgggggtctcaggactcgccctatttgtttcctccacatttccacacttcattccttaacatgtccgagtgttaatatgtttcttagctacaacagggcccttttccttgggctcccaggcttgtcttgggctatgacttctgtgacattggaatcacaaatagccccacaatcattccatttttttttctttgtttttttaaaacaggctggagagccatcttgctgatacctgtggaggccagaagagggcattggatcccctggaactggagttacagatggttattagccaccatgtgtgctgggattcttcctctagaagaactaatgctcttgactactgagccatctctccattccctctggccccaaccttcctacctcaacctctccagtactgggactccccactatgccagcctaataaatttaccctttcttccccacaccacttagcactacctttttgtgaatactgtccacaatcctcccctccccaattctataaccccaagtccccatccaactctttatttccagaacaggaaacgggagatttctgccccattgtattttgctcaaggtattttccaccaaataagttgagaactgcagtgttcagaagagagagacttcaaaacagggggaatgagcacaagagtactgtcctcttatttattggagacaggttctctatgtagtcctgactgtcctgaagcttgctatgaagactaggctgttttcaaactcaagagatctggctgtctctccagtgctaagactaaaagcatgggccaccatgcggggcactgggctaattttcactgcttgctccttcttccaacaccatctcctggggcctccattctaagcaagtgctcctaatgctgaaggggagatactgttttagaaacctgttagcttgaccagtctgactgagctcatagaacaaattacactgttgttggggaaggccatttaggaacagtccacccattgcagagaggcactgtgcccataacccagttcataattagggagtgcttgtctctcagctctttatcaacactatgaaatcgaagggaagcagagttggagtaaaggtaaccaaattacctaacttcacaccaagacaactttcttttcttttttgggggggcagggtggggtggggaggggttcgaggcagggtttccctgtggctttggagctgtcctagaactcactcttgtagaccaggctggtctcgaactcacagacatccccctgcctctgcctcccgagtgctgggaggcatgcaccaccaccgcagggcgggccgacaattttcactgatggaagctgtcttggatttgtcccttttcttaaagagggcactggggattgaatttaggggctccagctcctatcattcagctatgttaccactgagctagattctcaaaccttttacaattttgtaacagggtgtggctaaatagcccagactaacctgcgtgtggctaccctcttcggcctccccatgagtccagattactcgtgttaactatacaggagtcttctgtgtaaccctttaagttatttttgtttgttttgttttttgacaaaggatctcactatgtagttttggctagtctggaactagcaatacagaccagactggcctcgaactcacagatctcctgcctgctccgccactcagaaccctaacccttagtctttaaccagagaactacttgggtaaacagtcgtctccagctgaagcatccaagttgccgtatagtacgtgagctctcagtaacgccccctaggccaggctgctgccccaaagtcaccctgaagagggcacctttgttcgctggctagcggatgccagctacaagggggcctgaggaaggaaacacaacaattgaccacgtgttaggggtggttctcgcagaggctgctgggacagggaagggaggtccacgtggagtgggcggggcgctctgaaagttttggcggggggctgccttatagaggggaaacaaacaaaataaatgaaaacccacccgcatttgaattgtgatcttaatggcgaaggaaactggggaaagcaggtgggtgctcccggtctcccactcccgcaggcccgctggagcgcagggcagggctgctggcagaaagctccctgagccctgcagaccttcggcggaagcttctggctcccgactggtaggtttcctaacctcaatcgagaagggagacaaggtgtcgaacccgggccgtggtctccctgcggtgctttgtgggtgggacaaaagctataatgagagtcacacaactccaatttttatttacctttcctgagcacctcgggaagccgcccgggagactcctctccctggagagaagctaagacaaacgttggccttcttactacccagtcctgccccctgttagcaacctcattgtcaaaaatggaagagaccaggcaagatgagctcctccaatcaattttccttctcctggggctgtggtggaggtcggagtggtgcctgagaaaatcacaccagggcaggtaaaatggcttgcagaatgctcttcacaccacgatgcccttcaaagaatggggataataggaatggaattctgcaatgccataaacctgcgtaggatggtgaaagacttgctattaactccagacttgcagccactgggcaaagtggttatcattccactagagataaaatggttcagggacttgatttatgggtatttggcactgcttctcttatgttccctcgcaactgactctgcttttagttttttgttgttttaggtcactgtttctctcatattgtagccctggctgacctggaattcattatgtacaacaggctgaccaattctcgggcctcaccctccttccagggctgggattaggggcgtgcctcaccatacctctcctggcctttacactttgaaacctcacttccttatgtgtttaagttcctgggtcaccaaagcttaggcaagaattctaatgaaagtaattctttgcctggcctggaggggcacacctgtagtactaatctcagcactttgggaggcggtaaggtcagaaagagttaagaggtcagcctgggttacagaatgacaccctgtctctaactaactaaataaataaaaatctgaaaatcaaaacccagaaagaccttcctaagtttctggtggtctatcctttggagttgagctacaatcagactgccaatccaaagattccagtctttgggagaaaagtatgtttatttagtttgatgcagtgaaattgtagactttggattttagggctgaaaagtttccaggaaaaataaagttggggactgatgtaggattaccagctggtaatttatctgcgggtaaagacatcgttcatttcacataagacatattttagggcaatggatcgaaagttcacaattcaaggtcagactgggcaatttggtgagactgtctcaatgtgtcaaaatcaggctggacatattgctctatagaacacttgcctagcattcatgaagtcctggttcagtgtctaggacttttaacaaacacaaaagagctaaatctccattagaaactgctcccacacaccttgcaccaatggctacaggtactagacagtgctctcccacccacaatttatcctagacgtctctagttcagtctgtgtaccccagatcagggatggcaccaggaagagaagatctaactcagcatttaaaaagcaattataggggctggagggatggctcagaggttaagagcaccaactgctcttccagaggtcctgagttcgattcccagcaaccacatggtggcttacaaccatcccttatgagatctggtgccttcttctggtgtgcagatatacatggaagcagaatgttgtatacataataaataaatcttttaaaaaagcaattatataaacaggctcttgctgtgtacctcagctggctttttttttttttttttttttttttttttttttttttttttttttttttttggtttcttcgagacagggtttctatgtggttttggaggctgtcctggaactagctcttatagaccaggctggtctctgaactcacagagatccacctgcctttgcctcccgagtgccgggattaaaggcatgcactacgaaagccccactggcttctaacttttaatcctcttgctttcatcttgtgtgttgggattacaggtatgtactttcaggcctggtggcacaacaccttttggtttgcctgacaaacgaagatttgttactagcactctggaggcagaggcaggccagtcactgtgagttccaggccagcttgggctacatagtgagatcctgccacaaacaaaccaagaatttgtaatagttgcaaattttaaaatgagattataaattaagattactagaactaggactggagatatagatcagttgttagagtacttggcctgtggtgaatgtgtacaataataaatgcctaataaatacagcactcaggagataaaggcaggaaaataataagttcaaggtccttctcagttacacagttaattagaggctacctgggatggacacacacacacacacacacacacacacacagacacacacacctcatcttaaaactccaaacaaaattatgagaaatacaaataccacataataaagttatattggaaaatgacctcattcatatcatttctgggggctaagccgggcattagtgacacacgcctttattcccagcacctgggaggcagaggcaggtggatctcagtgagttcaagaccagcctggtctacaagagctagttccaggacagtctccaaagccacagagaaatcctgtcttgaaaaaccaaaaaaaataaaaaataaaaaaaaataaaaaataaaaataaaaaggctttacagccagccaagcctaaattagtcactacctggtcctgcaagagtaggtaaataggcttagcctagcatgatggtgcctgcctgtaatcccagcactcaggaggtggtaggtagcacgaagaccaggagttcaaggccagtttggtctactcaagaccctgtcttgaaaaaaaataaaacaaaaccccagaaaaaaacccaaagccaaactagagcttctgaatggtcaggtctaaggtgggacctggtaatttgaacattcaagttttcaagtggtgctaatgatgctggtttggatttattatgtttgtgcatgtgggggaagggggcttgtcacagctttctgtgaagttgggataatcttgtggagttgcttctctccttccacctttacacacgtgttggaatttaactttggtggccaggcttgcaggacaagcacctgtgcctgctgaaccagctcaccaacccgatgattgcttcttgtagtttcaagccacagccttggcttctctctttttaacttaaaaaaaaaatttaatgaatatgtatgggtttttgtctgcatactacatgtgtgccttccagaagagggtgtcaaagcccctggcactggggttacagatggttgtgagccatcatttaggtccctggaattgaacttgggtccctctgtaagaacagcaagtgctgttaatccctaaggcaactctccagcccttggagtctccttttatgaattaatattaattttatttgtttggcatgtgtaccctcactgtgaaaatggaggtcagaagatgacttgtttatctttcaatggagtttcagggatccaaactacgtcctcaggcttggtggcaacttgccttaccctttgagccatctcaccagccttttatccccccatgtgatactgaggattgaacctagtactttgtaggtgctatgtaaggaaaaagcagtctaccactgaaccaaagcacagacctgtcactgtgacctgggaagtcttgaactttcaatggtactaaagtcttcccaaatagctgggctctgctcaccctctacagatagtttatatatccctgcaccacaagcaccccagattaactactgatcccaaactaagtctaagttggcttacaattaagagcctactttgtaacaggtatgggtctagatacatgcagtaaacaatgtatgagattcacatgttagtagttgaggataatgcaggacaaattatgtattatatggtgataaatcttgcagaaaaaataaaggtcagcacttaaaagatgacatttagggggctagagagatggctcagaggttaagagtattggtggctcttccagaggtcctgagttcaattcccagcaaccacatggttgctcacaaccatctataaatctcagacacacatgcagacaaaacactgtatgcataataataaaaaaagatgacatttagtaaagggccaaaggaagtgagtccatgtggatgacatgtgatgaagtgacccatgcagggagaacagcaaatgcaggaactgagcagacagacacaggcagtgaatacacagaagtggaggaaaaccgaagagccccgacatccacaggagttccaagggccagatcttcaggcccttacaatggctgcttttactccaagtgagataggaagctgagagggtttagagtgaggacgactatgatcttctgttttatcaggatcaccatagatgcccagaatagacaaagatcgaaacggagagactaattacaagcattccataactaaaacnnnnnnnnnnnnnnnnnnnnnnnnnnnnnnnnnnnnnnnnnnnnnnnnnnnnnnnnnnnnnnnnnnnnnnnnnnnnnnnnnnnnnnnnnnnnnnnnnnnnaaaaaaagcagattgtagtttacatcacagtggaagttgtggacatgatgcagaagggtattatttaggatttgtagtttgaaagtaagatgaagccaggtgttggtggcatacgcctttaatcccagcacttgggaggcagaggcaggcggatctctgtgagttcgaggccagcctggtctccacatcgagtgccagaatgggctccaaagctacacagaaaaactgtcttgaaaaaccaaaaaaataaataaataagtaaataaataaagtaagattaactggcttactgggtatggggaagcaggacttaggtggcagtcaaaagcttgactttgaaatgcctgttagaaacccagttggacacattctatacacttggagatatgactttggagtaagagtacaactggcttcaaatctggaaggttccagtgtatgtcaatggatagtgagatggagtcttcatcctgagaaagacattcaaagaacttgagaaagttcttcaaactcctcaaactcctgcccttctgccctgtcatatctctggcagatccaaggccactgggatggaaagagggctgggactctgactttcacacccattcccttaagcttttcagtgtttcatggttcgagcccccaaagcagaggacgtttctaacaagcagctttcaaattgtcctctctattcctgcactgtttatttttggagacagggtctctctctccatgtagccctgcctgtcctggaacttgctatgtagaacaagctggcctcaaactcacagaaattctcctgcctcacaagtgctgggattaaaggggtgcaccactacaccagactaccataaaaaaaattcagaagtgcacttgattcagaaaaaagttaatttgcaactatttacaagattttccatacggacctatgagagcttggtggctaaagttgcttggaaaatgatggcacacacatagacactacgaacctggagaaatggaaagagtgctcaaacagaagcccccccccccaaaaaaaaaggcttagtcctaataaaagcatacagctcttcatagcatttcctgcaccttcttcctggagatgctagcagtagctcaagtctggggacggacatggctgttgggaaagaactgttggtcgttggcagcacttcaccccaagaaggttgtggtgaaaactccctggaccgcagaccatcgtggattttgctgcttctggaaccagaggtccctccatttccgtgctggatcccttagagacaaagaacttcatttcttttccagcccgtgtgggaccgccttggagcctacggggtggaagcttgaccttccactccatgaaacaccaccggcaggctccaagggaagcctgggtcagggctggtccggaaggtgcgtggggctccggcgtgggccaggcgcgttgccaggctgccggggaagggccacccatcgcagcagccggcaggctcagcggagcggtcggcaggcgaccgcgaggggcgggcgcatctccctccctcccccttcctcccttccttccaaccccattctctcgcgcttcgcttttccggggatcctccgcattccccagccaccagcggccgccctcgcccttcttcccgcccccgagcccgccctgcctctgcagcccaccttcgcccgctgcaagcgtgctcgccctggtccccgtcctcccctcgtgggccccgcgccccggtcccctccccctcgcggcggcggcggcggcccctttcacaatagcgctacccgcctccctccactcggctcccggttcgctcccgcccgctctcctctcggcgcatgcgcgctccggtcggcggcggctgcggcggcggcggcggctccgtttttttttaaagggaaaacgctgaggcgccgggggtgactgtgggggagggggacccggagccgcggagacccccgggggaggcggcagaccccctcctcccggagtaggagggttctgggcggacccgtccctcccaccccctcctgaggaggagagggggggaaatggaggctcggggcggctgaggcgagctccggggcggggggccggggcggggaagggggggtgcggggtggggag

SEQ ID NO: 22 - DNA, 41715 bp, Cricetulus griseus
  >scaffold_12 dna:scaffold scaffold:CHOK1GS_HDv1:scaffold_12:37165669:37207383:1
  misc_feature 41107..41206: /note="n is unknown"
tatgtagccttggtgggctgggaactcactatgtagaccaggttggccttgaactcacaaagagattcgctggcctctactctctgagtgctgggattaaaggtgtgcaccacccacccacccacccccatccctgaaagcatgttccgatctgtaaagactgtctaagaggcagaactaatgattcggctggtcagggcctgctgaacagagtggtaagaaaaccatgctgactgagtctcctgcctgctgcaccagcccagggcctgtcgctccacacgcacacacgtgggaaggacaggactggtcctcaacatactctctgtgggcgcctggaagcggttaacgcagtgactcagccccatcagtggtggctggggtctcccagagacacagcttggcacaccaagtcatgtttttatttgaggttcatcttgatgggcagagaatccctgtaggcaggtggtgactaagcctggcgtgtcacgaatactgctggcctcctctgtgaaccactgtccctggaggaactaagagaatgtgtcccttccttcttgcacctgcagatgagagctgcgggctgaggaagccatgtcgcccctgaaaagaagcagatggctgcccagacacatgctcagccatgtgcccagccaggctcctaccacagaaaggacatgtcatagtcactgcctgaagccaggcatggtggctcatgtctgtaacaccagtactcagaacactgaggcaggggaataacctaacttaatagttaaaactaacccacccttccccgtttctgctcacaccaacgttccaggattcagcccccaaagtgtatcccagctacccctcccaacaagactctaaaatagctaagttttctttctccctcaaaaggttccctgtagcagcagggcttccacccacatcttggctcccccacactcccttcctgcctccctgcagacagcccactgctgcctccctcccactcagccctctgctctccgagatctgaacacccaaaaaggaaaaagggtttgtactgagggaagacacagccggggaggaagggaagggctgcatgccagctgacgctgcgcaggagaagctgcctgcgtctatgccaagggtgtggctcctgtgaattctgggagacggaggaaaaggagagagaaaaatgttcaggttcacatggtatatcccaagtcctatcacaaacggtattgaataggctttccccaaagggaggatggatgaaaggacaatagagacctcagattagatattccttcaagagcagttaacccagcaccctatgtgccaggcaacacacacacacacacatagcaaagattgcagacaagaaaaaaaaaaagctcacttgccctggaactccagcagctgagtgggagagacacaagcaaaagtgtaatataacagtaagaaaggcaggagcactagctatggtgggaacataaagggcagagcgctggtcaaacagccttccctgggaggaactaagctggtaaaagtaggggaaagtcatccccaggctgtagcagcacctctcagaggactgaggctgagaaggcaggccatgggtaccaggatgtgtttggaagaactcaggatgtgtttgttttcaattattttttttttaggattttcaatttattttattagttttattagtttgttttgtttgttttcagggtttcactatggagccctcacttggaactccatattttggtgaggctggcttcaaattcacccagacttgcctgcctgtgcctccagagtgctgggatcacagggttaacagaagggtttttgttttgctttgttctgttttaggtaaagtcttgctacatagcccagactggcctgaaacttgggataatcacctaactaactttctcaagtgctgagatacaagtgtttaccaacacactggcccattggtttaaaataatttttaaggccgggtagtggtgacacacaactttgatctcagcactcaagaggcagagacaggtggatctctgtgagttcgaggccagcctggtctccagagcaagttccaagataggctccaaagctacacagagaaaccctctcttgaaaaaccaaaatataaataaataaataaataaataaataaataaataaataaatggcaggagctggagagatggctcagcagttaggagcaccagctgttcttcccaaggacctgggttcaattcccagcacctacatggcagctcacaactgtctgtaactccagttccaggggggttgacaccctcacaccaataaacattaaatcaatcaaccaatagaattaaaaggcagggggaaaaatctccatcaacacaggtgggagggagcagggacaatctcacacctggtagtcaagtcaacagatgaaactacttttattaaagttgaagaagcacacatacagcaagacagacagacacacacagagcaaggttcgacgggggtgagaaaggactggggaagccaaggggaacgctggtgttttctagagggttgggtttttgtttgttttgttctgtttttgtttttagagaaagggtttctctgtgtaacagccctggctgtcctggaactcgctttatagaccagatatcagccagcctgcttctgcctccccagtgctggtagtaaaggtgtgtgccaccatagtccggcttgggtttttttgtttgtttttgttttttaaagggtcttctgtgtacctgtgtctcaagctgtctgacctttgactccagaggatgaggatgaagtgagaagcttgccatctttctcatctatcagtggcccctttcccaatctctccacttatcagggacctaactcctagttcctgtgattgatgggtggcataccaccatctgtaactcctttccaaggcatcccatgccttcttctgtcctttgagggctctggcattcataggcacagacacacagaaacaaacaacatataaaccctggagactgacgcttcatgtgttaaaggccggctaggttggttacacagtgaatgtgatgcctccctgagtgcaactgtcagggaaaaaccaaaaacagcaacaacaaaagaaccacaactaagagtgcatacctaaaatcccagttacttctgaggcaggaagcttgtgagttcaaggccagcctgggtaacagagaattttatgccagcccaagccacacagtgagaaaactatcctctcccattcctacaaaaacaagccatgcagctggggctttagcaaaaggttttaggatatacatgccttaccatacttttattttggaaaattctgcctggtgaccaactggggtcacaagatgggagaataacaggtgacagaatttggtatggtaccccagagagcagcagggaggacctgaattcagagtttcatatgcagagatcccaggtagaccttcaggtctttaatgatttggtttactggtcatggtcataagtatggggaatgggggtgagaaaagagggtgccaggttctgacgtggatgtaaatggagataggaaagctagggtcaagcttagaggaggcccaggcaagacccactagtgatcttctgagttcaaggtacccaggggcagccaggagctgaaaatcagcaaggaggtaaggtggggcttgtctgggaggagaggacacttgggagtcaggctgtagctaaaaccatgggggtggatgagatcacccaagggagggtaagggggaaaagatatgcagcctgggcttcctgcactcaggcctgatgggctgagggaacaaacacaagtgaaagtgcgtaacctgacccgtgtcagatagaggctcaaaatactgctggtaaacgaaaagtaggtgtagactggagggagggctcagtgtgtggaaatcccttagttcacaagtcagacaacctgaattctacctctggaaaccatgatgagaaaagagaaaagacccctgaaagctgccctctacatatacactgtggcatgcatgtaccacccctcctacacacacacacacacacacacacacacacacacacacacacacacacacacacacaaaatgaagaggggcatttttaatcccagcactcaggaggcagaggcaggtagatctctgggatttgagctcatcttggactacatagcaacttccaggccagtcagggctacacagtaagactctgtctcagagagagagagagagagagagagagagagagagagagggaggcaggccatattgcacaagtggaatcagaggatgacttaaagttaaggactcaattatctgcttccaccatgtggttcccaaggatccaactcaggtcatcagtcttggccacaagcatctttccctactagatggccccaaccttccatcttttttggaaactttctaccccttggtcccttgtccctgacccctgggaagtcctaagatgcttcccatagtagctcttgcctttccggtcctggtgctttgattgtcttaccagctgcaagacaccaaacgctcactctctccgtgcctcctactctctcccttgtctgatatttttaaacagttttatttgtagacagtcttcgtcactgccatcagctgtctgtttgaagtattttcatcaaacattgtgtttgtgtagttaaaccataactttctgtggagggaagcaaggcataaattattctaggatcacacttttaactaacatctcattggctctggaagttgatttgttcttgaatctaagtgtgggtgcattagttactcccaaagtcaaacaaaaagcagtgtggctgatggagatgcagaaggaacatttccaaagacagcccagctattccagcccaactcggccttctctctgttcgtcttgctctctgctcatccatccacctatacattctctagtccatctgtccttctgcccatctatcaactccatccattcatctatccatctatctaaaaacatcaatctgccaggcagtggtggcactcacctttaatcccatcactccggaggctgaggcaggcagatctctgagtttgagaccagcctggtctacagagtgagttccaggacagccaaggctacatagagaaaccctatctcaaagataaataaataattcaaaacattgtccagtgctttccttgtgccagacaccactaaggaatatgtatgtaagagggagttggcaccagcctccttccagggtgaatgagaaaaaaggagacaaaattttaaaagggctgagaagactgaacggagttcagagtgacactctgtcttttaaaaatcaaacaaatcaaggggccggttatatggctctgtttgtacagtgcttgcctagatcctctgggttcaaataccacctaaaaccaagtgtggtggcatggcctgtaatcccagcactgaagaagtagacatagcaggatcagacacacaagctcatccttagttacaatgtggcaaaacaacaaatacacaatcaacaacaacgagccaggtacagtggcttatgcctgcaattccagcccttgggaggcaggccaggagaatcaccacctgcttccatatcaagagctccaggccagccagggctgcacagagaccctggatcagatcaagtcaagaataaattcatgcaccattccatccttcttctttctttcctctaccatttcttctaaaattctacctccaggcgtaaattggtacgtgggtgttcacctaactagttttaagagcccctcttgttttggggtggggagaccaggcaaaggaaatggaaacagtccccagatcccttggcagccctaattgaggcctgtcacacagagagaagccggctgcaaattgcattcatcaacgaattacagcaattacagtcccagcccctgcctaatggggtgaagacacatccagtcaggcttctcctgattcaggaatggcaaatactttgggctaccaatctcatttcatccagccaaggccccaagttttatcctgggcccatgctcagcctttacacaactcatcagggaggatggggtcccctccaatcttcaagaggtctctgaggtatttttctcagtcatctctgaggctctgccagcaatctaggaccaaatgttattactgggtcctcagctaaatatcactcagggttagcccttgggagagctgttttgttggcatgtccaagggcagctaagagcgccctccttgctggcactaggccagctcaatccttccatccttgctgcccaccctgacagcactaggccaaagctagggtgaggctcccatgaaacctgtggaggtgtagtggaaccgtcacctcccaggaggacaggtatgtgatcacccacatatgatgggagctttttcctcactcccctcccaggaggcagcaattctggtttcaacaatgtaagggtgcgcgcgcgcgcgtgcatgtgtgtgtgtgtgtgtgtgtgtgtgtgtgtgtgtgtgtgtgtgtgtgtgtacatgtatatatgtgtatgagaggcacatccatcacaggacagccacatactagggaccacaggacaaggaggatatgaggatatgacaccagagctccttggtttgatcttggatgtaaaacagcagccaaatgcctagaaagaattttcttctcctttgccctttgcctcaggttctggctcctttacatagggctgtgccaaaagaaggggaaggttcagagacagtgcatccctatgcccacccctcccactaaacacccatcccctctactccccctccagcttagctttgggtggggacagggaaaggaccaggaaaggaggtgtcttttctgatctcaagtttcaaaggaaaccaggccaggaccacccttcctggtcaagggaatgtgtcctgtggtgtctaagtaggagttgagcctcgggatggtggtgtgtgtgtgtgtgtgtgtgtgtgtgtgtgtgtgagagagagagagagagagagagagagagagagagagagagagagagatggtggtggtggtagaggtggcgtggtgaggggtgggtgaattgctcctgagcagtcctttctctgtgacaggaagtgaggctagatataaccaggaaaaagaaaatctgaggaaagttgtacatgtctggtgctctctgggaccccagagccgccttctgtggcagttaaggaccaactgagcaaaggaaactgtcgggggaaacccccaagtcccagctccccggtggctctcaaagaagctcagggcttcatcctgacttccagaaaaatgtcaagggcaacaaggcaagatcaaaggcagggaccaggggctggcaatggagggcagaatgaggagggtgaagacagatgagggagagtcctgagagggctgaattgccgcacgtgagcagtgatcaagacggcagcttgctcggggcggccagtgttttccagctacaccctgaatagatgccttcaagcaaggctccacccagatcccctatattggcccgggtgttggctgccaaaaccttcccctctttggacacttgcccttggcctagcgggtgctcacagctagctagtcatctgatgatgcagtcataagaaaccagccttcctctggagagagagagagagagagagtgtgtgtgtgtgtgtgtgtgtgtgtgtgtgtgtgtgtgtgtgtatctgtgtgagtggtacccacatgtataaagttcctctgtgcagtgtcatgggtctcagctcagcctgagatgaccacagagcagaaggcacatttcctgagaagatctgacctggttccgccctgttccctgtcttccccagatagtaaaaggggacctaccctgggaccctgaatcatgatgcaactactattaaaagttcactggaaaagtgagaaggattctttttggttttgtctgagacacagtcttactatttaacccaacctggtctgaacacatagccatcctctggtctctgcttcctgaacattggagctgcagatgtgagctgtcagcctcagctaccagacaggatcctttttggaatgcatctccaaagctttctgcagggttgagtcagagccatactctgagctgtgaaggacagacgtgctaggctcctggaacccattttgcttccctccctttctcttgagagtctgctcctctgtaaatcagggaccttttttgtctctccccatagcaaaccagatctaaaacattttctcctttatgctaatgtctgtagtgagcatgcattctgtcactgaactaaactcctagctccccaatccacttctttttatttttgttttattggatttatttattttatgtgtatatgagaatgcctactagtgcccattagatcccctggaactgaaattatgcatggctatgagccacgggtgctgagaacagaaaccaggtcctctgcaagagcagcaagtacagtcatatctttggataaaccttgtatctccagtggttagaatttgtctgatgaacaatgtgattggattcatgctctaggtggcagataaaagggttggtgggggagttattctaggactgccctctccactcaaaacacacacacacacacacacacacacacacacacacacacacacacacacaggcacgttaacatccaagttgcatgtaaatgtcctgcttctgtttgtacaaaatcagaggcagataatccagtttctgggttatctggatacccaactgacatcatcctcctgaggaaaagagctctcctgactactccagcaccttgggtgatggggtgaagaggcagaatgatgcaacctcaggctgtcaatactgtggctgctgctccagcagtgtgatgaaagatcagacactattgggtgaaatcacattcaggagtcatctgtggatgtcacgtacttgtcatctgggctcgtcaccaggcagagttatcaagtatttgtaaaattcaagcaaaacaaactctgaaagaggctaagaagaagccaggtgtagtggcacacacttttaatcccagcactcagggcaatctctggaaatttaaggccagcctactctagtctacatagcaagttccaatacagccagggctacataaagagaccctatctttaaaaaagaagaagcttggagatcttttcctaaccatgttggagtcatgggtcacaggagaccatagtttgaagatatatttaatcattcaagatatgcaaaactgctgctgccctgagagctttccaggaaggggcgcaggcagatctttcaggttttttcagttctccctgccaagtccttccctgcagcctcttctggctccctaaggtctgggacttttctcctctgacttcagtgggcaggaacagcagtgcatccttccctgaatgtctctatccccaaatatctgacccacagatgtgacttccatatttctggaagccacattctcttttgtttgtttaaggtcctgaggactgaacctggggccttgaacttgctagacaaacaaccactcagacacacccccggctttggcagcacattctttaaaggttaaaaagaaagagatgtgggctgagggtgccattcagtggcacaggcttgccaaaaggtatgcaagtccatggctgaattccaacgccacaaatgaaggagaaagatgaggagataacgtggacctgaggtgggagaattaggggtttacttcagctaggtaggaaatgaactagatgccactctggactacaggagacattgctccaaaagaagccaaaataaacaagcaagcaaacaacaacaaaacaaataaggccaggcctggtgtctctggactttaatcccagcactctggaggcagaggcagatagatctccgtgagttttaggccagctggatctatataaaggagcagttctcaacgtgtgggtcatgacccctttgggggtccaacaaccttttcacagaggttgcctaagaccatcagaaatcacagatagatatctacagtagtaaaattttagttatgaagtaacaacaaaaataattttatggttgggaatcaccacaacttgaggaactgtattaaccggctacggcagcagtattaggaaggttgagaaccactggtatagagagttccaggccagatacatagtgagaccttatctaaaaataaacatggtaaataaaaaaaaatttttttaaagaaatgataaaaacagactagttttttttttctttatcaaagttagtaccaggatagtcaaggctacacagaaaaatcctgtctcgaaaaaaaaaacaaaaacaaacaaaagtaatgaataacttgcttgtttgtttttgaggtaagatctcctgtagttcaggctggcatcaaaggaactcaatatatagtctagggtgaccttggactctttttttttttttaatgtatatatatatgttttgcctgcatgtctgtctgtgtgccacatacctggttctgagattaccaaagttgccagaagagggtcttggatctccctggaactggagttacagatagttgtgagcttccaggtgggtgctgggaatcaaatccaggactttggaaaatcctcctgcctctaccgtctgggatcacaagagtgtaccaccaacagatgaaactaacttagataacatttttaatttttaaattgtatttcatgtggtgtgtgtgtgtgtgtgtgtgtgtgtgtgtgtgtgtatgtgtatcagatatatgtggaggtcagaacacaacctgaaggattctgttctctcctcccaccatgtgggtctcagggattgaattcagcagccacctttacctactgagccatctcgttggcccaataatggggaatctcaggaatctcatagaacttgaatgttctcagatgacagtgggaagaactgggggaggggagtggtgggcaatctctgaggagtgtcctaggccaggtaattacagggaagggaggaacgaaactgtgtatattaccctccagactcaggcctttcctcctgagtgactggcagggccaggactgttctaggccagtgctcagagtccctccctaattgggatgctttgtgatcacaatctctccttaatcgggatgctttgttccggctcagggttattttctttgcctctcctcctcctggaataggataagctctccaatcttacttgctggctgtccttcctggggactgtcaacatttataaactaaaatcacttcctaccccaccttccagcctttggggacacgtagtgtcccagggataggtaatgcttggggacaggcaatgaacagactaggtatgtgcctaaaagtcagaaggtaaacaaatttagtcctaaataaggtcattcatttcacagtgtgataagatgagggggaggaagaaagtgctacccctactcttctttttgttgttgttgttttttcgagacaggatttctctgtggctttggaggctgtcctggaactagctcttgtagaccaggctggtctcgaactcacagagatccgcctgcctttgccccccccccaccgagtgctgggattaaaggcgtgagccaccaacgcccggctacccccacttcttattaataatataaaatgaaccaggagcggggaggtgtgggttagtgctgaagagtgtttgccaagcatccatgaggccctgggttccattctcagcagcacaaaaacaaaaacaatagcaacaaaagtagcaagttccaggtcagtcagagttatgctgggagacgttgttctgaaaaaataactactcccacctaaaccagatttaaactaagcttgttggtacacacctatagtcccagcacttgagagacttgaagagaagaatcaagactacaaggccatgttgaaacaccatgaacaaaatcaatttggaattgggggggggaagggtttatttggcttacacttccacatcactgttcatcattgaagggagtcaggataggaacacaagcagggcaggatctcctgcagaggccttgtaggagagctgcttactggcttgctcagcctttgtttgttctgtttttggagatagtgtttttttctgtgtaacagccctgactgtcgtggtgaagggaccagctccccatttcggcagccatacagccgaacacgtgcttgtctgaccttagtcactaggaagtcaccctgcctcgtggcaaggaaccaatcagaagttagctggtggtgctttgctttatggctctgggtgtgctttacggacaagtgcacagcaatgacgagcagagcatagcaaccaccctgggagggcctattggccataacaaccagttgaccaatcaacacagggaaagccctccaagcctggaggcacaccaatcctgagcctgtgcgtacccctagacactccccttacacttccctataagatctctatgcagacacttcgagctgtctttcctagccatccgccatggtgggtggatgaaagtcccgagctaacatggggttagctcgttaaacaactataataaagcctcatgctgtttgcatcaagcttttgactcccacctggtgattggagtgaccgaggtcctgggctgagatcctggaggcctgagattttgggggggggggtcttacaatggaactcaatttacagaccaggctggcctcaaactcagagatctgtgtacctctgcttccgagtgttgggattaaaagcgtgtgtcaccacactcggattccaccctactttgttgttttgttttttgagacagagtttcatctgtatatctttggttgtcctagaacttagtctgtagaccaggctggccttgaactcacagagatctgcctgcctctgcttccctaaatgctgggattaaaggcgtgtatagcctgatttttttatagaacccaggaccactagcctagggtggcaccacctacaaagtgcgggggtggggggtggggggggtggggacacatcaatcactaattaagaaaatgctccacaggcttgcttacagcccattttatcagtggaggttcccttctctcaggtgaatatagtttgtgtcaagttgacataacactggccagcacacctgccaagggcctcatttatagatttagatgtaagatgggtaaatctaggaagggggataacttggtcatggtcgcagttggtccatggtcatcttatccttcagctattttgtgggttactctctgggatatagtcttgtcagactgggggctcaggaaagtataaagccgttctgtcctagagtggaacgcagtgggtgactttataaaaaccacacaaaccgacacacagaagcagagccagctgtggtgttaatacgacatgcctgcgatcctggcactcacgagctgctgaggtgggaggaacatgggttcaccagctccagctacagtgagaccctgtctcaaaacaaaagacaaaacagacaaaaccccaaacataaaaaaaaaaattcgggaaatggggtcaaaaagatggctctggttttaagacccaatactgctcttggagaggacaggagttcagatcccagcacccccaccaggaggctcacgaagtcctccaggtaacctccagaagatctgactcccccttctggccttggtgggcaccttcactcctgtgtatataaatacctacacacaggcacatactggcacacacacataattaaaaataataaattgttttctttgcttgcttgttctggagttatatctcaacagtagagtgcttagcctgtgtttaatccacacaagcaggtgaaggagacaagatgcttcactttcaacactttaaaaacagctgtaacctctcctttcctctaaggatctttcctccagattaacctggaagggcatgcaaagtacaaaggagattagactcctgcctttccacctcgacctatcccactccacagggggtgggggtggggcaggattaactgagaggtctgagtgaaccagagtgcccaggccccaaacagcccagagtgttctaggaaacagatccctcaagctccttgagctatggcatctggtgggaatccccactataagggtcaaataggggtcatggtagggggggtgggaatgttccagaacctcctctgtcctctttaggaccagagacaattcctccctgctcagcaagcatttctggtcgcagtctccctccctgaactaagtcccctccacctcaggatttatttcagggcttgcttcgcctactttgcctgacatttgtgacaagctgggtgctagggagtccttaccatctgccagcctccgccaccagccaggcagccggcagtggtggcaagcctgagctcactccctctccacccaagtgaatcttctacccagttactgattctatttcttccctctgtaaagcaaagacactatgtacaagtcagtactgcaaggcctggagaccagcgttggagggtgagataagataaattttcaacttctctctccctcagactttgggaaagccttaaacacgtgctatcctaaatgcacctttaaaagaggaaaagctaagtagaccaggctagacttgtactccttacctctgtttcccaaatgctgggactaaagacatgcaccaccatgccttatcacatataccccttttaaaaaattgttttaatttttttgtttgttttgttttttgagacaggatctcactgtgtagctttagctggcctggaactcagaacttagaccaggttgagctcaaactcatagagatgcacacattaaaattaaggtcatatgacaccatgcctgactctactatgttaagaaaaaaaaaaaaaaaaggtattttgtgtgcatgtttgtgatctgtgtgtgtgtgtgtgtgtgtgtgtgtgtgtgtgtgtgtgtgtgtgtacgcgcgcgcgcactgccatgcaagtgtggaagtcagaaaacagctttcaggagtcagaagacaagtttcagggctcagtctctccttccatcttgtgggggtcaaacacaagttgtcaggcttggcagcaggggactttaccccatcttaaataccctggacataaggaattttcctcaagtgtacaaaaaatatgcaaagggttcatggttcattcacacagtgaatcaataatacattcattaataaaatgatgatacattcacaaaatgaaatctcatgtagtcatcaaaaagaaagaatgatcataggtgccaacaatgaatcatgtccaagatataaatgaaaaactgagcaggacactttatataaccctgtgtgtggttggagaagcatatctttttatcaaccatatgcaaagaaaaacacatggaaggatagattcaaaacttgttcataaccattagatcaaaagtttagattaggttgtttctctattttctttcttgttttttgtttgttttttgttttgttttgctttgttttgcttttccagacaggttttctgtgtaaccctggctgtcctggaattccctctgtagaccaggttggtctcaaactaagagatctgcctgcctctgcatctcaagtcctggaattaaaggaattcaccattgtgcccagcattttctatttttggttgtgagactagcctttcactgctgagccatctctccagctcaacccagcattttctaaatttagacttctttcacactaaagatctattgcctttgtcatgggggatggtcagaaaaaaaattatacatattttactttttttcttactttgttcctgtgtgtgtgtactgcatgggaccctggtgctatgggaatggagtcaagaatacttgtgagctaccatgtgtgggctgggaattgaacccaggacctctgaaagagcagccagttctcctgatgaccgagtcatttttccggctctcttgtcccagaatgggatttttgtttgttttttttgtttgtttgttcgagacaaagtttcattaggtaaccctggaccacctggaactctctatgtagaacagtttgaccaggaactcacaggggtcttcctgcctgtctcccaaggtctgggattagaagtgtgtacagccacacccagccagccagtgacaggtttgtttgtttgtttttgagacagggtttctctgtgtagttttggagcctatcctggcactcgctctcggagaccaggctggtctcaaactcacagagatccacctgcctctgcctcccgagtgctgggactaagggcgtgcaccaccaccacccagcccaatgacagtttttaatagtctttagaagaaatatttttaatagtctttagaagaaatataattaactggtagaatgtgtgcttagcttgtagaagtccccaagctcaaacccagcgctaaaggtttttttttaaatattttatttatttattatgtatacaacattctgcttccatgtatatctgcacaccagaagagggccccagatctcgtaacggatggttgtgagccaccatgtggttgctgggaattgaactcaggacctctggaagaacagccagtgctcttaacctctgagccatctctccagcccttgagtttttgttttaagacgggcttgcacctgcagcataatttggcatggaactctgcagtatttctgcctcacctctggagcactgaggtcacaggcttaaactacccacacctggctaaaccttaatcattcattcattcattttgggttttttgagacatggtttctctttagctttggagcctgtcctggaacttgttttgtagaccaggctggcctccttgaactcctggtgctgggattaaaggcatgtgccaccaccacccggctatttatttttttaagaaaaaaaactttttttcttctggctcaaccaggggaggaggtcccatgattccatccagactccccagcagtgaatgcccttggaaatagagagcagcctgctccttccaaggaattgtatttggtcagggtggaggggtattgggggtaggggagtggaaagtgggcttcaaagcctcctctcctgattttccccttctagtgccaactggcccccattcaaaacaggcctctggtggaaaataggccatgttttacaacgaggcctgtcttttttttttttttttttttaagacaaggtgtcactagctctggctaccctcaaactcggtgatctgcttgactctgactcccaagtaccagtattaggcatgtgctaccaagcccagcctttgccagactttctcatactctgaaacaatgtagtcatctacaaatttcaaagctggagagccactcaactgtgtttcccaaagttgcacaaacgctaaatgggtgacttttatgttgcgctggattgggcccactgggagatgtctgctttaagaaagactggtgagccaggtggagatggtgaagcacctctttaatcccagcatttagaggcagaggcaggtggatctctgtgagttggagaatggccagatctatacagagagttcagaacaactagggctacagagaaaacctgtctccaaaatcccaccccaccctacccccccaaaaaaaatgaaggagggagggagagaagagaggaggaggggaagatgaaaagaagaaaaaaaaagaaagactaacgcttcatagtgtgaaaggagggtgtggactttctggccagatttgaagccagtgctctgttaggagataagactttccactccccaggaagggagtgagagaagcggaaagctgggctttaatctaatcaaggagagggaacccggtgaaatggagggaggggtaggactcgaaagctcagtgatggcaacttgtttgcctgggagcaaagatttgaatgtagctgtgtgtccttgggcaaatccctgcccactctgatctttaggggctttctcccttctgctttctctgtttccgttgagtacatatgcaataccaaaggactgaagagggcaatgaaatggagtccactaccatctctgcccccagaaagagcggctccaaggacggaaggcatgcaaggaaaatgccctccctttggattgtacattcaggacttgtgcaaggaaagaggatggccagtgggaggagggctgagtcagaaggagcccagactgtgggcctcaggacacctccaatttccctttacagatacccagttccagttactactcctactccagggcccctctcctcagtgagagaaaattatacttatcaggacaaaggaaatacaacctgactcctgtccttgcccactcgagtgacccagtgttcaaaattcagaacccagtggcagggctggagacggggaatccctgtctcctggtctaaaagacaggaaggcaatcctcctgtgcagatctctggttctattcatgggtcaatgcaagattattccaaagtcccaatgcccccgcaccccagctacccagtatggctttttactaagaattccccaaggctcccttctctccaccactgtcaaagcaatcggctcttctatctctcatctgccgtccttcctctcccttcctctaccactgccagctcaacagtcaagtccaaggggtttggggtctcgaacagttgcaggcctcctgtggaccaggattcctgacctgctccttggctaggacataagtgacaagattctaggtttttaggaggtttttttgtttgtttttctttttctttttctttttcaagacaggatttctcagtagctatggaactcaactctgtggaccaggctggcctcgaactcacagagatctgtctgcctctgcttcctgagtgctgggattacaggagcatgccatcactgcctggcggttctagttaaataggtaagaaggaccagtgttcaggtgagtcagagtggagagctggtaccacagaaactccttggagagacagagcagggaatacatccctgtacacctttccccaaatccaaaggccttaatcctagaggtgactagatgtaaaaacaaaacaaaacaacaacaaaatgtgtcattgaagattttaaaacaaaagcagaattggggtagggagggaagatctcccaaagcaagtgggcctctggccatgtccttcccagcccaggattgaccctaaactgcaggattctggtccacaggaccaaaagccatcactcaggtgtgtcagagaggtcaggtagtacacgttcctgacggaaccagcccagcagctctgtcaagcagtagcgttgacgcacacttgggcacccttccggatcaatgcacactcacccccacccccatcccatctgagcttcaagggggttggaggacaaatctagacaggtcaagactgagcggcaagcttcagcttttggaaaagaagcctccctgagagagaactgctgagaccctccccacccccatcagatcccagggcaggactgttaatcagttctaaggatcccatgattgcgccaaggctgtgggtggagtgggggctggaaaagactgtccttggcttcaagactcccacccagcaagattaggagaatctcattgttctgctcagacacagctggccttcctgcaggggggcgggcccctggaagcctaagcaggaactccggacctggcaatgttaacgtgttatcctaccacgtattgtgttgattgtattggtggcaggtctcatgtcaccctgaatagccttggattcttgactctcctgcctctacccttcgcccatgctggcgtagactgcaggtgtgcaccctcagcttgttctgttaacatttgttgatggtggtttcccatgcttgtctcacaggtcgggagttgggtaggttatgactgctgtcccctctggggagaagctgttcccatagctgaagactcaggcttagtcaccaggccaacctaggtctccccagcaccagctgctgccagagagcttcagtcagcagattgagtcttagaggtggcataaggccaggagtcactttccattctcaccacatcctccaaatggggatagaaattcaaccaacttgagcaccaagcagtgacggtcagaaagactcagggcttgggtactgacagacctgacagcagatggactttgccataggtagaccttggagtagctggtctcaggagcaagggccaggaggtgagaagttggaaaggacccatgacccctaaaactagatcaggtaacaacagctttagagggtttcaattacctccagaacttgcaccgactatcccattagtacacaatctaatttgtcagtgtttgttttgttaattcaggagaagcattcccctctccccctattctccaagcaaatcccaaactctccatagggctagataaggggagaagaaattgccagatccaaacaagagctagaatcatctaactttaataacttacaggcaaatgctaaaaaacagtaataacacaggcttataaaaagggctgggcatctacaagcgtggggaggattcttggcactttcacagacacaaaaagattgtgactagaagagcagctgaggagacccctccccgcaactgtgcggagagggaagatgttctccgcttatcccaaatgcattctctgggcaacttttgcacaccctccccttgcaaaaaataaaaacacacatccaaataaaacgctagggaaggaaacggagaaccagggtcgaggtagagtcagcgtttgcatttacatctccggtcttgcagcccctaccctctagaggtgaagagctgagaagacacttcatctcccctcccccatgtggcaccgaaacaggaccccccaggctccttcagtcctttgaggtggacaggtccagcacccaggctggctgagaggtcacaggccctgccagactatcttaagtactgaccccaagtaggtagggtaggggcagcctcgggtcaccgtctcttcttgcttgcccgaggtgccttcttcctcttgagaatcatctcatacaggcgctccagtcctggctgcaggcccagcccgtccacagcactgcaggcttgcacatgggtgagggtggcagctgccagctcccggactgccagcctcttctccacctcggctgcactcagtgcccccggctggtcctgcttgttggccagcaccagcaccggcaccccctggttgtctgaggccttgctgattcggtgtagctccaccttggcctcctctaacctttcaatctctgcagagtccactacaaacaccagtccatctgtccggcgggtataggagcgccacagtggccgcagcttctcctgacccccaacatcccacacttggaaagtgattccacgggatccccccaagggcactcggatcttctcagtgttgaagcccttggtggggacactctggacaaactccttgaacttgaggcggtaaagaagggaagttttcccagctgagtccagcccaatgaccacaacatgcagggcctggaagtggggcaaaaaggatgaggctgtgggtgccatgtcagtcaagtggttccccatggtgacctaaggagcaggtctgggctccggtagaggccaggaggaggggaacccttgagatggcaggtagcacaaactgggttatctaaacaaggaaaagtcaagagagagagagagagagaagaaaggtttagaataaacacgaacttgcaacctctggatcccttcctaaaccaacatcccacccttctaaaatttccgtttattaaaacggatttttaggtgcctcttttcttaacaattaaagaaattattttgtgcatgtataagctacacatagcttgagtgtaggagccaggacaacttgcacgagtatgtgggtctcagggatctaatagggtcctcaggctttagggcaggcgcttttaaccgctaaaccatctcacgtgcctttcccattccccctttaagaaaaaataaaataaaataaaataaaatagctacaggtgtaacacaggcgttctcctgcccgaggggccctagcagaggccggaggccagagaaaccctcaggtgctaggaccctcaagggtgagggaccctgcgggctcgatcccatgtcaggtcattttgctgcgccccctctctcagcttgaggagtggaagcagacgctatgactttcattccccagaggagaatcctagcaggaaggaggcggccgggtagtgtgcccgaagtaagagccccgatccgggtccggttaccacaccattgacatgccctcgggggctgtggccgccaccccgaccgtcctgcggcagtcctgcctgccttcctcccgatgccgccagcggttcccccaagccccggaagcctgcggctctgcaccgcccggaccccccccccttaccttcagtctgcggcactccccaccagctacgccgagcagacacccgaacgccgcgtttcagccacagtggactttgcagcgccgctgggcaggttgagcattaaaaaccctctcgtgacgtcacatgacgcggaccaatcagcgtcccccaggcggagcacggaagaaagcgagcgggcctctgcagccccatcctggggagggacgcttgctctatccggagccgctttatttaatcttttgccaccttattccagtatttggaatagagcctggaattcatcagggctggtaggtgggaagaaccgaaggaacaggcgtggccgcgtctgacgacagcagggagaggaacgtctcaacactgacaccacccatccctttcccgcagacagagctgctggccccaccagtcgtctccctctacctaagggtgtgctccaagagatgctgacaagttccgtatcttttctcattcagtcgtcttctagctttcttcgtccagttttcaaaaacagtgtttacctggaaccgccatacaggctgattcacagtactaagcccgttactgagacagggtttcatgtagcccatttagtctgaatttattttgtaatcaaggatgaccttgaactcctgagactcctacctccacctcccacctcccaagtgctgggattgattgcaggcacacgcctcctcccccccaacaccccgagacagggtttctctgtgtaactctggctgtcctggaacttgctctgtagaccagactggcctcgaactagagttccaccggcatctgcctcttgggtgctgggattaaaggcgttaaccaccagtgccctgctctagcagctatttttatttctgcttctaaaatttatttatttatttatttttattttggggggaggtttcaaacagggtttctccgtgtagctttgtagaccagtctggcctccaactcacagagatccacctgactctgcctcccaggtgctgggattaaaggggtgcagcaccaccacccggctctaacctctatttttatttatgtgtatgtgtgtgtcaatatatgccacgtagtttcagaaggtgtcggatccccaagagctggaattacagtggtgactgcctggcatgggtgctgggaactgaacgtgggtcctctggaagaacagtaagtgctcttaaccaccgggccatctcttcaaccatttgggggtgggggttagttgggttttggttcttttgagatagggtctttctatatatccctagatgtcctggaacttactacatagaccaggctggcctcaaattcaaagatgtgcctgcctctgctggccattatcccaagatgctctgttttgtttgttcttaatgttttggttggttttgttttgttttgattttttgagatgggatctcactatgcagtccaggctggtaggtagtatgtggctgagcaagatctgtctgaattcagtgcctggacatccaccacttggccatacatcttctcacgggcaagccatggggctaggcagccttagtagaaattcctccatcaaggctgctcataacaacagcagaattccaagggcctaccttgttaaaatagactttaaaaggctgggcataggggctggagagatggctcagcagctaagagcactgactcttccagaggaccgggttcaattcccagtacccacatggcagctcacagctgcctctaactccagttccaggagacctgacaccctcacacaaagatacatgcaggcagaacaccaatgaacattaaataaaataagcaaataattttttaaaaagtctgggcatagtgacacatacctagtcctagcactccatacagagagaggggaatctcttagttcaagatcggcttggtctacacagtgagttccaggacagccagcattacacagtgaggctctgtctgaaaacacaataaaaataaacttttaaagaccaagttcaaagccaggaagtggtggtgcatgtctttgatcccagaatttggtaggcagaggcaagtaatctctgggttcaaggccagctcactctatagagtaagctccagaacagctagagctacacagagaaaccttgtctcaaaacaccaaaaagaaaaaaaaaaaaaaaaaagacaaagttcaactggtcataaccactacagtctgtaatcccatgcattctggaggctgaggcagaaggatggtaaattcagaacctctctaagctgtatagtgagttcaagtgcagcacaagcaccttaacacggacctatttcaaacacactgctgacccaggcatgcgggggcagtggtagagcgtttacctagtgtgcacaaactcggttctatccccagtactctggtgagttagtgaagagaaaataaagctccccattgacctcacactgggcctctgcatgagttctggggctacagatacctcaaagttcttactccgtacagagcacaggtagtggcagttgaggaaaacatgtatgttgagtttttacagatcatccaacaggagtccataggatttcagaggagggagagaactcgtcaactagaagcttctggaaaggcttctagagatgcaggacctgggtgggggcatcattcttagcagctgcaagctctggtttccctgaaggggaggagatgtcacaaagggcagtgtaaccaaaaggacaacaggattacccttactaaaagctgaagtgtaaagaggattggaaagggaggaggggaagttattgccagactgcaaggttccagccctttcctgtccagccacctctagccaagtgctgatgaaaaggcttccaggagtttaacaccagcatgccttgccacctccttgtcccctccctaccacaaaactagccacctggcttgtggggcagttcaggaagcctccaaatccctagagaccttcagcaattagtctaggaccaagaccttagaaaataactttttacctccttcaaatggggatgatgggacagactggaacggcagccaaaacagagaagcagagatgagcatggtggagctggcagaggagagccacgagacagtacgagggcacagggaacaccaccctacagaggggtactgcatgtccaaaagcttaacacaattttctttttgaaaattcataatggaatcaggcacagtggtccagccctgtgatcccagccctgggaggcaacaagttccaggtgagcctagcccacctgatgactttcaggacagccagtgttacagagcaaggttctttcaaaacacgaaaagaccaagttgggtgtggtggtccacacctctaatctctgcacttgggagatggaggtagaaggatcagttgtgtaaggttatcctctgttatgtagcaagtttgggatcaacctgggctacagaagaccatgtctcaaaagcaagcaaacaaaaaactaataacataatgagaaggcgggaagaagggatagcgagaagagagactcttaaagcagtgagtacccgagactttaattaccaaccaggattgtggtatgtttttttgtttttaaaaactctgaagcataaaaggactacatgacttatccaaggtcactcacctccccaggaattgtgcaaacaattctagcttttgagcaaaggctataatgactgtgaaactgaaagtacacaagttgttatgtgcctgccatctttctaacaccccccccatcatgggattcacacccaacagggaaactgtcacattatctgataaagaaaatgaaactgacgccctcactccaccctttatctttaatgtttgcagggaaggtgtggatggacaaatgggaggaggtgaggctggggagggataccggaaggaggtcttttttcctcccatttttgatgggttgtttgtttttgtttcagggtgatggcattagtcagtgataccttttaaataaagggcttttgaaacaaaatttaagggaccagagttaattaagtgtcccaggcagtagggcagatgagccgggagccactgcttccttttttggcttcccccctgaatcgaagtccagctgtttagtcagcacttttaactctggagggtggaagcttgttgttcttatctgcagctacattgatcacacactctgtgtggcatccactaagtcagaaattctgtaagacggaatgattataccaaggagagtccctgatcacagagctaaacctttacctttagtgtatgagattggcccttgagcccagagtttctgctagtaatgtgtgaccaagactggacttgaaactctgcatttcaaaggatcagaagttcaaaattctctctctctctctctttcccccttcctccctctcattttttggagacagggtttctctgtattgctttgtagcctgtcctagaactcatgctgtacactgaactcacagagatccacctgcctatgcttccctagggctaggattaaaggtgtgtaccagcaatccccggctttcaaactagggttgaagccagcctgggccacataagatcctgcctaaaatattggggagagaccagtgttatggcttagccagtaaaggccctggccccacaagcctgagttcaatcaccagaacccacataaaggtaggagagaacagactctgtaaatttgtcttctgacctccatagcactgttgaacacacactcacaagcaatgtacacacacataaaacataaactataaaagaaagtaaggggctggtgagatggctcaaaggttaagagcactgactgctcttccagaggtcctgagttcaattcccagcaaccacatggtggctcacaaccatctgtaatgagatctggtgccctcttctggtgtgcagatatacatggaagcaaaatgttgtatacataataaataaataaaatcttaattaaaaaaaaaagaaagaaagtagggctggagagttggctcagtggtcaagaggacctgatgttcttgcaaaaaaccatgttcagttcggagcacccacatggtggctcgaagccctctgtaactccagttccagagaatctgatgccttcttctcatctccttgggcaccaggctcatacaaggtgcaaagtcatacattcagagaaaacactcaaatgcataaaataaatacatctttataaaagtaagtaaaatattgggagagtttttaatctcttacttattctttgacaatttcatgtatgtagaccttttaagatttgtttttattttatgggtatgggcgttttgtctgcatgcatgtttgtgtgccgtgtgcatgtcctgttaccctcagaggctagaaccgagtatctgacccatggaattggatttttgggtggttttgagccactgtgtgggtgctgggaattgagcctgaaccccctggaagggcagtcagtgctcataactgttaagcaatccctccagtcccattcgtgaatttttgggggagaaaaattgaggctaggaatgggatataccttatatatccttaatatccccaatcctgatatgctaaaactttagatttcagaataagtatacatccagtccctcgataatacactggattggagaagcaactccctgaactgtcactatgtaaagagaggtttcagtgactgcaggctctcttcctcgaagtaggccttgctctagagtaagagatcttgagaggactggtggagctcaccccggaatggctgaacacatctcaacgggggtggtgttttcctttgcagcccagcagacctagaacttgaggccctcctgcctctgtgacactactccaccagtactgagattacagagagcgacaccacccctgccccaaaggcatcttaaccaagtacatgtttgaatgataaagggtctgtaagaaatgcagggagtgagcgaggcctaggagcagctatcaactcgggactcacagagacccatcctaccagatcacccgctccgcctccacttttccttccttttttttttttttttttttttttttttgagacaaggtttctctgtggctttggaggctgtcctggaactagctcttgtagagcaggctgttctcgaactcacagagatccgcctgcccctgcctcgcaagtgctgggattaaagtcgtgtgcctttttttttttttttttttttctcgagacagggtttctctgtgtagctttgaggctcggctgtcctggaactcactttgtagtccatgacggccacgaactcacagagatccacctgcctctgcctccggagtgctggagtgctgggatcaaaggcgtgtgacacctggctaccaccacttttcaaacgccaggtttttcattttataaacaaaatggagaaacatctatgtgtggttgcccatgcctttaagaccaacacttgggaaactcaaagattgttttgattttgagaacagcctcatcctaggctgttagatacacagtgagactgtagtcagagagacagaaataaagaaaacgagaaagcaatcatacacaaaaacacacgtctctcttaatgggtataggagcaaggtatgtgttgaaagggctgttttacccaaacaggaacctcatcctttaaaccggtgaactaataatagcacctactaagggctggaaattaccacatgctgccacctggcagacaaatttgtcactgccagacacggactctgctgctctcctcaacacgaccaggaaaaagccatatctctaagtacaaattctagtttacaaattgcagtcaatttgcttttttccaggcaagtcttcagcagctagctgcggttgctttggacgagcttacaagcgattggtgtgctgtcatggataaacttaccaaaaagaagcactaattgagcataagctatggagcaactctaacttttgaaccagcacaaaaaatcccccgaggggggtgcaccgttcctggaggtactgcaataccaggtcgatgcgtggagtggacggagcaagctcctattccaactcctaattccaaaaatccatttaatatattgtcctcggatagaggacgtatcagatattaaactgataagaacagatactacacttgatcttagccaaaaggccgagaagcgataaccccacgccgacacgccaccgcgccactcgcctgcgcgcacaccttcacatcacggtcgccgacgcgcgcgcgcccgcacacacgcgcgcgacaccgactctcctgctcgatcctcaccacgaccctaactccggggaaagcctgtgggatgcagcgtgggccgaggatgtttcctggctctcttcgctcccagagttcctaggagacgcggccacggcctcatttgcatgccccgcccagcaggcactggactagctcctagccggaagcaagaaggaagacaggctgcttcagccagtgtcctgtgtccgacccaggttcttcacaatgcgtcagacacaggattgaggaccacaggaagtctttgctctctcccactttcctaacccgctttctcgttctctacctttacatctgggcctaggagcttttttttttttttgagaaagggtttctccgtgcagtttttgagcctctgctggcacttgctctataggccagattagcctcgaactcggtaaatctgcttcccaggtgctgggattaaaagcgtgcaccaccactgcccggcattttgttgttttgcaactgtgtctcatactcagcccaggttagactgcagctcactctagcttcctgtctcagcctccttagtgctatgattacaggtgagagccactccatgcagcttggagctcctgtgtgttggtgttaaatcctaggaggagcctgaaaaaaacagaaagctgcagttgacatactcaagggatggcaccaagaatcagcagagtgggttgcaaggagaggggctggagagatggctcagaggttaagcccactggctgctcttccagaggacctgaatccaattcccagcaaccacatggtggttcccaaacatttatagtgataccaggtgccctggcctgcaggcatacatgcaggcagaacactgaacataatttttttttttttttaagccagagatgaaccagaatgtagaacagtgtgtgactttttctagggagacgtgaacaaacgtctctttcactccccgaaaaggcactgacaggcgacaaaagaaaggattccaccattatcaagtcacttatagatacaaggaaatatgttactcatgagagcatggaaaccccaaagatagctgctttagcagctcatcctgccatgggtgaagcctcatgaaagctgttatctgttatgggtctgggatcattcagagattttccagtctgaccatcaataaattttaataaggggctagaaagatggctcagtggttaaaagcattatctggttcttccagaagacccagtttcaagtcccagcacccacatggcagttcacacctgtctgtaactccaattccaggacttctgacacccttacacagacatacatgtcggcaaaacaccaatgcacataaaataaaaataaattatataaaaaatacaacaaagaaaaggctttcatttagatactggcaccagggctacacccaagcctcgagattcccaaatgtacccaggagctacattagtcggcttaatgcatgcaaagaacaataaattacattctgttcaccagcatattctgttctgtaaagtcttggttatctcaagcaaaacaaactttcttttatggaagcagaaacggggcttaaaacttatgaccagctgggcgttggtggcgcacacctttaatcccagcactcgggaggcagaggcaggcagatctctgtgagttcgagactagcctggtaacaagagctagttccaggaaagcctccaaagccacagagaaaccctgtctcgaaaaaccaaacaaaaaacttatgacctattgtctttcagaaacagcaattttgttagaattgtacaacaccagggcatgacaaaaagcacccatagcagcccttaatatttggaagtccagctttgctttacagttctctcaggcacaaaagcataagccagcagtggtgtcacacgcacctgggaagcagaggcaggcagatctcagtgaactccaggtcagcttgtgttactagaattttgtctgtgtcgtggtctggtgtccagtggaatagagaatttggttgagaggtgggggtcacattcagctgggggcagattcgggacaagccctcagaggagtgttgtgcccaccaagagagggacaccaaggcctcaaggagctgacaaaacccgaatgcaagtacaagaaggtttttatttcaaaagaaaaccagctagccggggctcagctccgtcgggagagttgaagcctcaaaccgcaaatgcaaggcacttttagagagaaaaaggggagggggagtcctgagacagaaagtctcaggtcacaaagttcccatggttccagagattacttagcacacaaggtttccatacaaggttatcatgaaacaaagggccttcaagagggcagtaactgtcacctggttaggtaaaattaattgccacatctgtgggctaggggtgcacatcctgcgatctcaaagttttacttaggtcaagaggctatctggttcccagtcctctcaagggggtaggggcagatgctggtgcagctgcttgtaggtttgaggttctggtcacgtactctgtgatcagagggctctctctttgtcacagcctaaacacttacgtcttttagttactaatttttccatcacaatgaggatgagccaaggccaacggttgcgctggccctttgactgggaagtgaacagtgccggtgtatgtgtcctggtcactttccattatctcaggtttcttttgtttatttatttggttttgggagacagggtttctctatgataacatttctggatgtcctggaacttgctcagcagatcagactggccttgaactcacagagattcccccagcctctgcctctgtcgtctcccaagtgctgggattaaaggcatgtaccaccaccacctggctcatgtttttatttttcatattttccctgaattttaatttataataagaggtaaaaaaatcactataggcctggtttgcacaatgaattctaggatagtcagggctacatgaagaaaccctatcttgaaaaccaaaataaacaagcaagaaaccaataaattagccatcaacagttacccattgcaaatcttccgggctatgggagtctctggccacaacagttactgcttatgtaagtgggtggggtggggtgataggtttcagagacttcctgagccttgcaagttttatttacttcctccctcttaacaggcttccgtttttctccaggtgggaatgtttcaattgagaagaaatccctacacaaaacagctggtaaacaagatcagatcctaaagccttaataatggctaggcaagaagttaagacagggctaggggcctggctggctaagcaagagctcaatagaacactcaactagcataaagggaaaaaagcaggtgtgtgtgtgtgtgctcgggcgcacgcgctcacacttgatggctttctcccaagactcaggtctcaaagaaattccagacaaaggtctaactgaggtgccctaactctggctgccagtctctctcagcattactagtacttgttagttacagagtcccggctctcaggacctcatccccactaccatccccttccctaaacctctctggtcccttggctttgcttccctccccccagttccttttcctgtgtaactcagccattttggctacgtgccctctgggttcacttggtcctcctcctctggactccttactggatctctcagggtcctcttggcttcttccggtctcctcacttggcccggtctatctgctggctatgtccagtctggactcttctaaatgcctctggctgtgtttcccctcatatctacaataaaaccttctcttcaaccatatctaagggtgatcatgtccttattgtcattcaatgaccaggtctggatcctagtggtgacaggtagggggcagtagtggccagattcagggggtatttggaaagaagccccgctagtatttgcagcaagtgctcttaaccaccgagtcatctctccaaactccagatttccattaaaattcctttttattcacctaaccagcagacccccatcctctattagatgctatgaactacatttggttcttgggatcagaaaatgaagatgttggtccctgaacacttaggagcttttgcatcgctgacacaggactcataaacaggtaaataactaataatatgttgagttttgccaggcattgctgactcatgcctttaatcccagcactggggaggcagaggcaggtggatctctgtgagttcaagtccagtctggtccacagagagagttgcagcacaatctccaaagctacacagagaaaccctgtcttgaaaaaccaaaaaaaaaaaaaaaaaaggacttggtattggccacacgcctctgattgtttaaatccttttgaattcacagagctgtgtatattactttgtaatagggattattaacttggagaggggaggtggatgcttcatcttctatgctgtttgtgtcatgtcctcaaacaagagctactacatggggagactgaaactctttatatgctaactcaatccctgtctgtttccacatactgtctttagtcgctttctttccttcctttctctttggaacaccacacctggtttttgatgccacccaggcttgaacaccgggctttatgcattttaggcaaacactccaccaaccaggctccacccccagcccccaggccaacctgccacttaaccagggatcctgaaaatgatacaggacagcactgaggcttagatggacagatactcggatcaggacttaggacatccttccatccacctcatctttaccgtcacttaatggaattggaattgattggcctcaagagtctccaaaatagaatctggcaggttgtggtatttgtgggtctctctcctgaccgcaggttcgactcagcaccagacacaaggcagtgcgacatcaggcctttgccctaaacagctcacgatgccaagaactggcaaattactactttggcttcaaaggatggtcaaaaaggatcgtcaaggtaaaccttttatgtcttttgactctccccttctacattagaatcctagatttcagggaggaatgaacagggcttccagaggactacagggaccagctaggatgaatataggtggaagtgtttcttagaccaccctgaagtagcagcctaggggtggggccacctccagtgtgttgggccctcccacatccatcattaattaagaaaatgtcccatagacttgcctgccggccatcctcagttgaccttttctcttttttttttttgagacagggtttctctgtgtagctttagagcctatcctggcactcactctgtagaccaggctggccttgaactcacagagatccactgcctctgcctccctagtgctgggattaaaggcatgcgccaccaatgcctggctgaccttttctctttctaaaccacccttgtcatattgacaaaaacctaagcagctgagtttgcccgacatgcacttattggtttgttgactgttgagtctagggtcttttccttgctgaagctttctatcacagagctacagccctacctcgtttttctttttctcgactatgtatgacaggtggacctcaaactcattaaccagccaaaaatgaccttggcatttctgaccctcctacttatacccacagactactttaattccacatgaggctgggttttatgtgttgctggggatcaaatccaggtttttgtgcattctgggtaaccaaccactctaccaactgagctacacacacacacacaccataaacacattttttccccttcaactatctcactgctttagtctgctaagtgctaggattacactggtgctttcctcctcatacactaacgtatcagaacttttgaagtagggaatgggaaaaggttccaagcatctatccttgtcgtaaaggtattcctgcccaaaagtgttcctgtgatttctcttgggcatagcttttcattgcacagccccagccagcctagaacactgggtcctcctaaggaccagcctgtggagttgaatacaggtctgcaccataaagctcaatccaaagtgaattttagtctgatgtttaaaaggaactggaccgctgggtgtacaagcccactgcattagagaggaaaaaccaggcagatctgtgaatttctggccagcttggtcgacatagcaagttctgggatagtcagggatacacaaagagacactgtcgcaaaatataaggaaccgggctgttgaggcaggagtatcccaggtctgggcttccaaggcgagagactccgtgcgaaaaccagacgaacaagcagaggaagggacgaaggggagcgggggggggggtcggtcccgcaaaaaatcccagagagctgtgttaccgcaaaggagctgaaatgccaaggacccatcacccagggctcccccgtcccctgagcggatcagaaggtgcctcccccagggctgcactcagccagggcaccggcccccctctcctccatcgcggatctcatctcagggcgagacgagacgcccatcggactagatatcaagccgagggagagtgcggtggtagggaccctccggaaggtggatactgtcagctctgagagatcgcgaagaggaacccggcggaagggcgcgcgcggcggcgctgtgcagcgcacagacagaacgcgcgctgggcggggcatgcaaatgaggccgtggccgcgtctcctaggaactctgggagcgaagagagccaggaaacatcctcggcccacgctgcatcccacaggctttccccggagttagggtcgtggtgaggatcgagcaggagagtcggtgtcgcgcgcgtgtgtgcgggcgcgcgcgcgtcggcgaccgtgatgtgaaggtgtgcgcgcaggcgagtggcgcggtggcgtgtcggcgtggggttatcgcttctcggccttttggctaagatcaagtgtagtatctgttcttatcagtttaatatctgatacgtcctctatccgaggacaatatattaaatggatttttggaattaggagttggaataggagcttgctccgtccactccacgcatcgacctggtattgcagtacctccaggaacggtgcaccccctcgggggatttctcatgctggtaaaaagaagttcgagtcttcctacactttcagccttgtttttctctctttttgtgtgcttccagtactggtggtctctgtggataagactacctttatgggcttgtgttaggcatgttcgtctccttttctttatctgtgctctttgggttgctgtttttgttacaagggtttttgagagttctaagaggcttcaatttgagggtttttctttttctctagtgttagaaatgtgtgtgccaggttctgagttttgtggttttaccgtctattgctagccacctcttcctgtcttctgatattggaaacttttgttactgttggagcttggagtcaggatttcgcggttttggaagcttttacataccaggtttgatctcgaactgaaagatctgcttctttctcacagtgctaggattaaaagcgtctgccacctacatgctacttgagctttttaggtttcctctgtgcctatgctggcactcgctctggcttcgaactcacagagatccgcctgcctctgcctccagagtgttgggattaaaggcgtgcgccaccaacgcccagccacctggtgggtttctaaacttattattacttaaattacaagcaattctgatttacattcatgccaatatcagtctctcctttgcttcttcctctcacggttaaaagtatgcagttggttctgtcttaacaccctgatccgtacgcaactataattttataaagtgctacaaatgtgaaactgatagtctttgagatattcatatgtacctttggtttttcgtggcaggctttctctgtgtagtgttagacctggctgctttagcctccggagtgctgagattaaaggcgtgtgcccccaccgggcagctgagatgctcatatgtgaaaggcatttaacacttgatatggttgtgataatatgcgcagagtattagtatatagcactgaaataaatttaaatacctgttctgtgggacgttttagggaaatgatgggaggctagactccgcccctttcccacctgacaccgccccttggcaccgccccttgtatgcaacacagttccaacttcgcggtagtttcttgcgcaagcgcagtggctttaccatggcggagttgattcctttcgtggttcccacccagagtgacaaagttttgttggtgtgggatctgagcgctggtgcccaagccgagaacttaagtgtgaggggctgcgcgagggcgagggtggcgagggcgagggggtcctgcgtgaggagtgctcgggcgggaggagtgctcgggcgggaggagtgctccgggctggagaagggcggggactcgcgggaccacactgggtttctcgtggagctggagagccgcactcacgtcgtgggcctcccacagcattctctgtttacagtgttctcgcagtttggccttctgtattcagtccgagtcttcccaaacgctgcagtggccagccctggtttctacgccatcatcaaattttactcatcgagagatgcgcagagagcccagaaggcatgcgacggcaagcccctttttcagacatctccagtgaaggtgggtgcaaatgcaggatctggagtgaagccccgagagcaacagtgagctagcgtttgtgcgactttctgatttacgcggtacttccaagtgcatttcccctaagcctctggttccaggaattcctagatgaagaaattcaaactcgtatgtcatgagtttgataatggttggtgacagtaactggtcaaacccaagcgtaacgctgaaaatcccatgtcactatgctgcctttcaacggtatgcttgataagtcgtgtcacaactcagtttatcaagcataccttttttaaaccaaataaaacagagaacgcttatgaatattcttaaatttcaaggcaacatagtgacatgggattttcatcattcccaaacagactatccaaaactcctctcccagaaggtgggcaaagcatcctttaatatattatagactcctagactccatttcgtattaacaggaaacccatttaatttgcccagaacctcaggacatcgcactatgtttctcatttccaccccctgtcctttttaaagaatcttttcagtttcaagaagtcagagtttctcttatattttcacctgtctctctgtgttcctaaaaccggtagtttttgccgctgtctttgtaacaaggatgttatttgttgcttgttttctttttttcttcgtgctcgagtgaaagacacccccccccccccccccgcttgaccggggatctctccgtggcagaagataaaggccttttcgcctgactactagaccttgagaaaatgctgatttgatgcttttcgcttctgtactatgctttttctcctatataaggacccttccttccggggctcgggggcttggcctaacagaagctaagcccccgggtacccgcgccactaataaagcctcttgctttttgcatccaagttcgtggactcgctgattcctgggtgcgggtctccttctacgaaagtaccgcttcgcaggtctttcacgagatcctttcagtttatcgtttttcattagcctcgtgtcttttattgtttttcaccttctcgcgttgctattggcttcaatttaaactgcatgaaatctcggtatttataatgtgtctgaatgattttgctgtttcctttttcaagattcccggggggggggggggggatgtgttttatcgtccctccgcccctttctctactggcctctgccaatgctgggattgcaggctctcgctatatagacagtcaggtttgagtttgaggtagggatagtcagagaaaccttgtctcagaaaacatcaaacaaaaaaatccgaataaaacatgtacttcttaaaagcaggcttagagaggcaaacacaaagggatcttcttcggtgcacacgcgcgcgcgcacacacacacacacctacctcacaattatttgtaattgaattttggcttaaccagaaaactcagaactcaaaccactttcaacaacctggcaagatttagaaaaaaagaaaaacaaaaaaacaccataaggctggagagttgtggaggctgaccacctccgtgtgcaccaagcatgctctacagagcactcgggtgaggtaggtggatctcttgagttcaaggccagcccggcctccagagctaacacaaaaaccccaacggtaaatatacaaaaagcaaaaatgtggttcatgcctgtaacctgtttcaggccagtacattttaagaaaatttatttagacgatatcccccaaagttggcatttcagagaacagcctggtttcaatgtcctttttgtgcagaaaggactagttagtgcaaagcagctgtcaacataactgacataggggtcaggttgtctctgagttcgagaccaaggaaatgagcacctagcgagagaagcaagtcgagaagtacttaaacttctttttaacgagcataagaagtcccccgagggggtgcaccgttcctggaggtactgcaataccaggtcgatgcgtggagtggacggagcaagctcctattccaactcctaattccaaaaatccatttaatatattgtcctcggatagaggacgtatcagatattaaactgataagaacagatactacacttgatcttagccaaaaggccgagaagcgataaccccacgccgacacgccaccgcgccactcgcctgcgcgcacaccttcacatcacggtcgccgacgcgcgcgcgcccgcacacacgcgcgcgacaccgactctcctgctcgatcctcaccacgaccctaactccggggaaagcctgtgggatgcagcgtgggccgaggatgtttcctggctctcttcgctcccagagttcctaggagacgcggccacggcctcatttgcatgccccgcccagcgcgcgttnnnnnnnnnnnnnnnnnnnnnnnnnnnnnnnnnnnnnnnnnnnnnnnnnnnnnnnnnnnnnnnnnnnnnnnnnnnnnnnnnnnnnnnnnnnnnnnnnnnntcacggtcgccgacgcgcgcgcgcccgcacacacgcgcgcgacaccgactctcctgctcgatcctcaccacgaccctaactccggggaaagcctgtgggatgcagcgtgggccgaggatgtttcctggctctcttcgctcccagagttcctaggagacgcggccacggcctcatttgcatgccccgcccagcgcgcgttgggtctgtgcgctgcacagcgccgccgcgcgcgcctttccgccgggttcctcttcgcgatctctcagagctgacagtatccaccttccggagggtccctaccccaacaccaccgcactctccctcgccttgatatctagtccgatgggcgtctcgtctcgccctgagatgagatccgcgatggaggggaggggaggggaggggggccggtgccctggctgagtgcagcctcgggggaggcaccttctgatccgctcaggggacgggggagccctgggtgatgggtccttggcatttcagctcctttgcgg

SEQ ID NO: 23 - DNA, 28184 bp, Cricetulus griseus
  >scaffold_15 dna:scaffold scaffold:CHOK1GS_HDv1:scaffold_15:32528347:32556530:1
  misc_feature 19692..19791: /note="n is unknown"
  misc_feature 26287..26386: /note="n is unknown"
ttgcttttctgaatcctcagtcaagctttaataaatcacaaataatatatcattacaagacagcctccattatctctctctgatttgtgcaaaaaggaaagtcaggcctttgtatagcctgggcttcttgcccaggacctgtggcatgcagagtatgtgaagaatgtgtttgttcctgcaaccattaggctgagaccaaggcagattgatgtgcagaaccaagacatacccagtggtcatacctaatctgcagaatggtgcagtcagtcatgttcctgtacctcagcatccctgccgattggtgatggttgttggcctgatggcgccccggcttcaagtggagaagcttcaggtgaacagctggagctggctgccccttactttgaagtcccctccccctctccactcacactcagggtttgctgagtcactgggtgggacctgggctctcttctaagcctcacatgcaagttctcagccctttgggttttctggatccttgtttctctttgtcatagacatgtcaatgcagccaggagtgacagcgcccactatgggagtcgggaggggagtgcacagagagcagagtggaggccacagagctgggctgaccctcttagccattggagaatgaggaagttccctaacctctgggtacctcagcatccctgctgaatggcgatggtgggcctgattttgcatggtggttgggtggattttctacatctggatgttaaagtcttttggatgttcctagagtgagtttgcaaaactgaagtcctgctttctccttcccactcacagggcctgaagaagatctctgcctacatgaagactaaccgcttcctcccaagccctttgtgcttaaaacaggtcacgtggagaaacaagtaggaccctgcactgctgggactggtaggaaagacctgtcagagccccgggggccctggactttgaaccatctttgggtcctgctgtcccctctgcacccgtcttcccccccttttctgcctcttccatttctttctcctctaccaggagcattgtgtctctcttccccctagttattgtgaaggctctacatgtgagctcgtcactttttggttctttcattctcttacttatttttctatagtttttagccagacagtcctgggctttgttttgagcaacttaattgactccattgacttggttgagtggtgttcattgttttgttcttttttttctgcagaattttttatttgaattagaaacaagattgttttgcatgacaatcccagttccctctccctcctttcctcttctattcccccccaactaaaaccctacctatcatgtatcctttttgctccccctagatgcggaggccttccatggggggggtcatcagagtctatcgtatcctttgggatagggcctaggcccacccccatgtgtcttggctcagggagtgtttctctatgtggaatgggctcccaaagtccacacctatgctagggataagtactggactactacaggaggtcccgtagatttctgaggtttcctcactgaaccccatgttcctggggtctgcatcagtcttatgctggtatcacagctctcagtctggggaccaagagctccccgatgttcaggtcagttgtttctgtgggtttcaccagcctggtctggacccctttgctcatcactcatccttctctgcatctggattccagttcagttcagtgattagctgtgggtgcctgcttctccttccaccagctgctggatgagggctaccgggtggcatataagtcagtcatcaatctcattataggggagggcatttaaggaagcctctcctctgttgcttaggttgttagctggtgtcatctttgtcgatctccagccatttccttagtgcctgatttctctgtaaacctaaaatgtcttcctctattatggtatctccattcttgttatcttctattcttcccccgactcaacctttctgctccctcatgtcctccgcacctctcctcttctccccttctcattctcctagctccctccccattgttttgttcttaggaagagctgggtcatgagactgtgattggaactctcaatcagatatggttctggatgtcctctgaaaattccgaccctgagattaccgcaggaggatgctccttctgtgtcaggctccctcaccatccagcactatgcaatacctccattggctgtgtatggttgtgtgtccggctttgaagcaatgctggcctgatgggaagcggtaagcaggtcctaggctcaacatctgttctcacctagaagtttttcctgaattgaatgttcagttttctgaacattcttctttcttctcaagatgtctccctataagtattcctgctgcttgtgactggagttgtgggtgttttcacctaactcaatcataggctcctttgaaggatccaggcattgttagacttttgatctctgctatgaatgacaatgtctggtgtactgtcagtgttcaggaaactgagacttgcttttcttctctctctctctgtctctctctctgtctctctctctctctgtctctctctctgtctctctctctgtctctctgtctctctctctctctctctctctctctctctctctctctctctctctctctctctctcgatgcttctgtcaatgctaggaattagagctcgagagataaccatggttcccctagaaggcatagaatgaggtacagaagattttccatgtggagctgttgtagtctgacccagaggactggtctcacttaagcatttctgaggctgcagctgccactgagtgactgaggaagggcaggccaattttcctgggcccaagtccagcagtatgtaagcagaggtgctgtgggcattttgtgtcagctcacccacaaagagctgggctcattgaagaagcatcttctgctggtggcagatcctggattctggcctttgtcaagcacttccttcttcttatctgtaacttggaacaggttggaggacagccctgctgggcattgtccttatgccaagttctaactgctgcctactacggcagtgagaaagtaagctttcttgggcaggatgtgagggtcattatgaaataagtgattaattaaaatgtaaagcttgtaagataagagattattccctttattcgttgaagagaagtattgattaatctgataagatcaaaatcctttaatccagcccttattaaacattgactcacatgagtagactaaagggtaaactgtgtgtctcagcgggccgtactacagcttccatgacagggttcttcttcttttgttttttgtttggtttggtttttggtttttcttttaaatttttttttttattggggtgattgccaggacaaagggcagattccaggagatggtgaggtaagtgggattggaaagcatgatgtaaaatccaccaagaatcaatgaaagtaaaaacaaaccaacaaacacaaaaacctaactcaaacacagactaaataacaggaaaaatggaagttaaagggaatgagataaacatgtagacacaaatattaaatgagagtaaaagtgtgtgtgtgtgtgtgtgtgtgtgtgtgtgtgtgtgtgtgtgtatacggaaatcagaggttgacaatatcagatgtcttcttcaatcactctgtaccttattttttttttttttgagactttgtctcatattgagcctggatctcactgatttgactgaactgtctggctagcaagtcccaggattcatcctgtccccatctcctggcactgaagttgacaggctcatgcttccttgcctggctttcccacaggtgctgggaattagactcagactggtgagcatgagcactatgcaagtacttcattgagccatctctccagtccctctggctcttttccaattcctcttctggatatcattctgtagaagtcatagatgccatacagtgaacaggtctggacacgtcccattgaacgtattccactcacaatgagtgatgcaacaaaaagaccaaataactcaaactcaggcaaaggacttgaatggacttttctttttcttgaaaagatatgcaagtgtctataagcacatggaaaagtgttcaaaaattacttatcagagaaatgtaaaacaaaactgcattcaatatctgcctcacacacatctgattggtcactgtcagtaattacagatggtgattatatggagtaattggaacatttttgctttgtctctgggaatgtaaagtgctatagctattatggaaattaggttgttcctcataaaataagtgatagaattacttatgatgtaccaattccttttctaggcatatactcaaagtaattcaaagctcatatctatatggtgcatatataatatgcatgcacatataatgtataattcatatgtaccatatatagtggatttaaataactatttttggctttttaagacaaaatttctctacttagctctcaaactggcccagaattatgtacgtagcccaggctggccaagacttgtaatcttcttgcctaagcttcccagtccttacaatttcattttgtgccactgtggccagttaaatgtgtgtttgtatgtccatgttcaaagaagtattgttctggtgaataaaatacgaatgaaatcgatggggaatgtctttctgtgtgtttatcttactggttgttgaataaagtactgttggccaatgaagaagcaagttacacgagactaggagtaaaggaggattctgggaaattgtagtaaagaagagttgtgatccaggcaggaagtgacatagcaggcagactcagaatataagcaggaaatcactctcttgctttttctcttccttctgctctccactctggagccgccatgtgatcccaggaagaggatgcgtcccagaggaaggcgtcctctataagataagtcttataaaatatatagatttatgataattaagactgagctagcatttaagaaatcctagtcaattggccagcagcattgtaaattaatataagactgtgtgatattctgggcaccctcttggcgtcggggctggggcggatgaagtaaagacttaacgttacatgaaacccatgaacccatttgcaaatgaatatgaaaagaaaatgcagtatagaaacacagaggaataattttcagaggagggctattttgatacatgataaaacttagatgaaacttgaaccaataaaactggtttaaaaaaataacactgtaagcattttacagttctgattatattagttactctccctatcattctgacataccaggcaggacacaagggcaaaaaaatgtatttaggttgacgtttcagaaagtttggcccgcaggcccgtggccctatgtgcttaagtggaatatcatggcggccagaacatgtggtagaggctggttttcacttcttggtgggtgagaggaagagggtgtggcaggaggctcctcagactgaacatcttcaaggagccgttcccaggctcctccgcttgctcctcctccccgtcttatgttctaaattttctaccacctcatgagatagtgccacctgctactcgagtgttgggcatatgaccctgtgcatacattccttattgcagctatgacacataaggaaggcaccacagtcacagagatggcggtttctgaaggctggagggaaaggacagctgatagcacctcctgtttacaaaaagggaaagagtcacagagtggtggcagctgccaacattaatgcacatggcaatactgaactgacacgatggcaaatgtgatgttatagaatttgccacagtaaatatgacaaataaataagaaagaaaacaaagaatgataggtggttgctgcacagtcccaaaattcagatgtccccattaaaaaagccaaatgctacgttagatttgaaattttaaatgttgtaattaaagaaaggaatcaagagtagcttcattctcatatcctaaggataaaataaagaaggcaaaactgcaaatgaaaaagatctctgaatattgtgttcccagttagaagagataaaaatatcgacttgaaggtctcagctggaagcagaataagatgaatactgcagacataggcaacaaaacatgactcgcatctgtgctgtaggattcagctcagagagatagcaacctagaagacagttcatctcctggggagattccaggagattaagcatctctcctccatggagtctttcggggtctcagcctccttctttagggtactttctccttgttagcttttcaggttcatgaagagaagggggcactgaatcgagttgacctgtacgcaagagttttgcagatcgctggtaggcaggcggcaggacacagtaagagtctgaaggaagtttcagagcctgttctttcaaggtccccgttggggggagtgaagaggaagggctgtatctcaaggaactgggtccaaggtcggctgatatcacttaactagactaagatacactatgttttttttgtatttctggcataaacaagtgcttgaaagtcccaaggacatttctggacaagggcttcttgaagaacaaagggcatagttagtacgtgataggacagtgttcctgtgttgcatgcagtcctccgtttagggcttttctacccggaggggccctttaccagggaggggaagactaactccctgcctgtgtgctctgatactcctgtccatagaaggagctgtatctcaattatgggagggagggagggagggagggagagagagagagagagagagagagagagagagagagagagagagagagagagagagagagagaacacagcccaaggcagaagttcccaacatgcagacagggtggagcagtagctgtcaaggccaatcacatcttattggtgaggtacagggtgctatagtcaggtcaggaacacctacaatgttggcggcagtctgtgtgagaggggctacctacaagttgtggggtggagaggcaggggttgccaggggccatcacttgaacttaccagaggggaaatactgagcattagtcattatgtgggctacatgtagacagacagacattttgaaaaaccatgctattagtatctccagtcaggtgaccagaacctgtttagcccagactttccgtgtcatctcacgccccctgctggacaggtcctatgtctcctctgaacttgttgaagctacttacaattcagtccaggccacatgctgccaccggtatcgctcagagcatcctactgtattgagtgaacactactattcatcaatgtcagaacagagtggattcttcccagagtggaccttctgctcctagagagtagagtgtgtgtctggaattctccacctctgcctgtggcctgtgccacagctttgttccagctggttcagataatctctgcacccctggaagtaacaggctcaatcaatgagaagtagctcagcatgaaggctgaacatggaacccttgaccctacctctgttcacctgttgctggatgctccccgttcagattcatcaatgagctttctagtagacagcccttaggtagccagaggacctctgcttctctctctcctccctctcagcctcaattacttcccaacttcacgtaaatgttcaaatatttactcattcctctgcctccccacttagcaaattttttgacttcatgaccctgagccccctaagttgtgtatatgtgttcctgtgtgtgcacatgtgtacacgtgtatgtgaaggttagaagttgacatcctggaatctgctgaatcagctagacaggcatcaggaaacctgctggaaccttttgtctccacctccccagcactggggtttataaatgtctgccaccatgacaaacttcttcatatgggttagcattgcctggaaaatacttaccaagtgagccacccccctgccccttgagactgttttaaattctgcttttaaaagtcactgatgttaagaacctgaaaaagagaggctttgctctcaggtaacattggtaaggttttgtctttgagttttaaccacaggtgccacagtgacttacaagacatttgagccactctcttggtacccaaacacacatgagatgaggcaggagcttgggccaggactgaaaccagtgagctggacagctgagagtttgactgttaggtacttgggtcctctgctgagtcgttcaaggtcctctctggacagaatccggttgtcccttagaatcaggagaggcatctggtccctcctcgccacttcatgatgttgagttcagggttctgtccatggtgatgggaacatttcaatctcagaagccctctgtatctgattcttggatttagttcacagatatggccaaagtactcattcatttatgtagtcactagcttgatgaccaaagagctgggttctggtggtgatttgaatgagatgccccctataggctcatatgtttgagtcttggtccccagttagtgaaactgtttgggaaggattaggaggtgtggccttgctggaggaggtgtgtcattgggagtgggctttgagatttcaaaagctcatgcacttcctatcagttctctctctgcctcctgcttatagatcagatgtaagctctcagctactgctccagcaccatgccccgctgtctgcttgcctgctgccatgcttctcatcatgatggtcgtggactctccctctgaaactctaaactctcattaaacggtctcctgtaagttgctgtctcagggttcacatcgctgtatagagacacaatgaccacagccacttttataaaggaaagcatttaattgcgggggagaaggggctagcttacagtttcagaggttcagtccattttcatcatggagggaacgtgacggtatgcagacagatatggtcctggagctgagagtgctacatcttgactcagaggcaacagaaagtcggctgtcacactgagtgaagcttgagaaaagagacctcgaagcctgcccccacagtgacacacttcgtccaacaaggccacacctcctaaaagggccactccctttgggggtcattttctttcaaaccaccacagctgcctcggtcatggcgtttgtcacagcaataggaaagtaactcagacagcccccaaatcgtctccccccaaagacacagaaacttctcttctgtttggccctgtccagctggggtcgttcccatttcactgctcttatacctccaggctgtgggacaataaagcctggagtttgttagattggcagagttctttcttccagtgatgggtacaagaatagactcttaggccgagagaattcttttttatccatacgttgagatctgagcctccctgaatgacagattcccacagtctagttgtgaaaacccgtccacaaggaaaggagaggagcagaacaggtcatagctggcgtctccaaggataccgcaggatctagaaggatccagcagggggcagacgggagcaggcctgcctataattgcctttggtttctgaaaactcagccccgcctccggattatagccctgggcttggattggctttgactcctacagtcatggtgagttgggctctatggttccggggtcggctcacttaggggcggggcagagccgctctggaactgctcagtctccacgctgtgcgctgcttctgcaagtggagtcttctgcccgtggcctgactgcagtctccaaggctggaacagaaatcatgcccgtgactctgggctattgggatatccgtggagtgagtgaaaggttgggcccccaggtgggaagagcccagggtcaacacaaaggaagatgcccaacaggtttttcttgagccctttacctgtctctgtcagagccaccctgcccagtccctccctccactctgtttgcctccctccctctcccccatctctctttttagtgaaaggtggggagattttcctagaagaggtgaagtcacacatctaggatctccctaattgtgacttttgttaccggccatctctctcagctgggccacgccatccgcctgctcctggaatacacagagacaagctatgaagagaagagatacgccatgggggacggtaatgacactcttttttagtcagattctttcccaactctgtcctattggtgcccagcggcttctgcctggttccctgtgtctcagctctgtgactcagctccagatgaacccagagcgaatcccttcgagaaacctcttttagggtgcatctatgtttctcaatacagaaccttggttctggtatgccggcccttttctgactgtaattggctgaggtttgcccagtactggcttagtgcttttgtaagccttagtcatggaaggcctacagccattatggcactattcaagtgtaccactttgggatggaagattgactgggtcagactactattccctgcacaaggggtcccacccttgactctttgggggtggggtgggggtggtactgggtaaggaggcttagatgccggtgatcccttttcacaccatcttgtctacagctcccgattatgaccgaagccagtggctgaatgacaaattcaagctgggcctggacttccccaatgtaggtgcagggaaagggaggtctggggagggcatgatgttcccacctcatctcctcacctggctgaagggatttgggatcagagcttcagctctctgctcccgctcctggtggctgcacagtgtttctgtgatgggctgtgccccagctcttcatgtcatctgtccctgctctcctattcagtgtgttcatagagagctcaccatgccgggcacattgaatgccaggccctgtgtctgtccttacccagggaaggggtgcacagagcctgcaacacatctgactgtccctgcttgtctatccagctgccctacttaattgatgggccatacaaggtcacccagagcaacgccattctgcgctaccttggccgcaagcacaacctatgtgagtggggctggctgcagggtggggcgtggtggtcacctccctgggcttggctggggtgggctatgctgagagtctctgctgtgtgtgctgcaggtggggagacagaagaggagagggttcgtgtggacattttggagaagcaggttatggacacccgcattcagatgggcacactctgctacagccctgactttgtgagtccctcctgtgtggcatagcctggctttgtaggaggcattaagggcttgtgttcatacccacacttgttgtctggaatttgaacccacccatactgatctgccaagctttcctatcctaccaacatgttgagttcccaatccaccaccattttgtcaataaacaccacgtgtcaattccaagttttgaggtattgtcatgacaccaatgattgggaattcattccctatgtagtcaattcatatgttcagttctcttccactttgaccttgactactaccatgtaccacctggtccggttcacccaccaaccactactcctgaagttcacagatgaaaaccagagggaaagaagtcctgggtattcggaaacacaccgaacagttttcccagagcacaaatttcagtagtagcacaaatgagctcctcttgctaaaaggcagcttgtggtcagctggaggaccactgtccctttcaacacccaacactgttcagctatattcaccctactccgaaagtgttggagtatttgttctggtaccatcgcttagaagtcacttcatctcttctcttgatattgttgagtactttgcttttgtgcttctattggacctctgggtcaagaagctgccagctgcccacgaagtcctaggttagatgtcagtcgtggcaaattcaggggccagtgtggcatcccctctaacttccaatcactcctgagaaatgaaactagcagataggcgtctaaccatgaaaacagctaggtgtcagatcctgcaggcccagtattaggaaggtgcctgctcctttgcccagccctgccaggccatactttgatccctttgagcctgtatgagggtggtgacagctgttttctgcttcaggagaaacggaagccagagttcttgaagggcctcccagatcacttgaagctctactccgagttcctggggacatcgccatggtttgcaggggacaaggtaaagagggtaactggtggagaggaggagccgccattcttcccaggtaaccagatcccatcccactgaccctggcttcctgcagatcacttttgcagatttcctcgtctatgatgtccttgatcagcatcaaatgtttgagcccaagtgcctggatgccttcccgaacctgagggactttgtggcccgctttgaggtgatgccctgatcccccatcctcttgtatgtccttcccttcccctttctgggatgctcccctagtcccgggggttaaaagaagaataacaaggaactactgagccagccaggacccttgagcagcctcttagatctgtggagtcaatgtatcatttcaacagctggcaacctggatagagttaggcgtccctccggactgagaaggaatcttcgaaggtcctagctccagcagagactgttctgggctcctgactgcctttggcttctaaaggcagcattcagtgtctctctgatttgtgcaaaaaggaaagtcaggctttgtacagcctgagtttcctgcccaggacctgtggtatgcagaacatgtgaagaatgtgtttgttcctgcaaccattaggccgagatcaaggcagattgatgtgcagaaccaagatgtcctcagtggtcatatttaatgtccatgtctagggaagcatcgtgatcctgggctgttcccgggggatagttttatcttgagttctgttggtgggtgtgctctcgcctccctctcttctttcgtatctcatgttcctctatgaagtgagatcatacttttatttttattcagattctttggaattttcctctgtgtgtggcacagggtcaggcccagcaggccattttggatctgagtgcctctggaagcagtaggcacagcagagatgcatgtggcattaaagtgctggctggcccacagttaatcatggctatgctgaactctctggtttgacatgaacaagacccacatttttattttttcattttccagatttgcatattggcgccattagtatagcaacagatctcaacctggaagtgtttctctttctccactctccatcaagggatgcatttaatttttagttagttctcatcagccctggttctggagtggagtggccttgggagtgtgcaagagctgggtccagaagccctagttgtaggcacagatgggtgtagcttgttgggggctggtagctctggctctattggtctttagaaatgacctgtgtattctttgctgaggtgtcctgtaacacactctactgcatcagagatatagatggggttagttggggctcagggagatggcgcccaggcttcaagtggagaggcttccggtgaacagctggagctggctgctccttgctttgcagtcccctccccctctccactcattctcagggtttgctgagtcactgggtgggacctgggctctcttctaagcctcacatgcaagttctcagccctttgggttttctggatccttgtttctctttgtcatagacaagtcaatgcagccaggagtgacagcgcccactatgggagtcggaaggggagtgcacagagagcagagtggaggccacagagctgggctgaccctcttagccattggagaatgaggaagttccctaacccctgggtacctcagcatccctgctgaatggcgatggtgggcctgattttgcatggtggttgggtggattttctacatctggatgttaaagtctcttggatgttcctagagtgagtttgcaaaactgaggtcctactttctccttcccactcacagggcctgaagaagatctctgcctacatgaagactaaccgcttcctcccaagccctttgtacttaaaacaggccacgtggggtaacaagtaggaccttgcactgctggtattggcaacccctggttccctggacactgactgagctgcagctagcttccagtaacttctctgcatcagccccccatttctgcctctgtcttttcatgaccttcccctctacaagaatcctgttttttactcaagcctcacccttggcaaagtccctttcttctcttgtttgcttctgtcatgtttttttcccagacaacctcactgtcctttaagtagctcagttgatgcctttactctaccccaccccccactgttgcccaaagatccatagtgcctggtatgcaggctccgtctccatagcgggatggcccagccttgtttggtctctagtaaagtatgagccacacttgctttgtgtcgtgtcttctttcctgtgattcggaggcgtgactgcacttatttcctgtgattcggaggagtgcagtctttgttctgatattcctaaggacagttaggtgatgggaacatgggggtgggctctcaatcaagcaggaagtaagatcatgcacagggatgggaaatatggctaatttgttaagagcacttcctgttcctgcataggacctggatttggttcacaatggtggctcacaataacctgtaaacccagctccagggaatctgatgctgtctgctgcctgctcagaccctcacatacacttggtgcacatgaacttaggcaagcagacacacatacatatattaatgaatctttttgaaaagagagagatcacaatgtcccctgacagtgggattctattgaaagaccctcagattgaggaatctccaatctggactgtcgcccaagaactcaatgtccagtccagttgatgcaacacgcaagaggctttattgcagttgtttaacgagctaaccccatgttagcttgggcctttcatccatccaccatggcggatggctaggaaagacgcttcgaagccacagcatagagatcttatagggtagcataaggggagtgtctaggggtacgcacagactcagattggtgtgcctccaggcttggagggtttgccctgtattgattggtcaactggtggttatggcccataggccctccccgggcggttgctatgctctgcacatcactgctgtgcacttgtccgtaaagcacacccagagctgtaaagcatagcaccaccagctaacttctgattggttccttgccacgaggcagacatctgacctcttagtggtcaggcaagtacgtgctaggctgttatggctcctgaaatggggagctggtcccttcactacaggagtacctcattcctaatcctgcactgtgtagtacccgcattggccatgcctacctgtgagcctgccatctgacaggtgctgggctgatgggcaaagggtgagcaggctccaggttcagtgtctggcctcacctggaagtcatctctcattccaagatgttttgctgtaagcattccctactgttggtgattgtgttgtgggatcttcaacaagttcaatcatcagctcattgatcctggccttgttgatcctggcctgtcgcacagtgtctggcatattgctaacattcaggaaattgtgaagatttgctttagagattcttgtcccagtgtttagaggaagagctctggaaataaccataggacaaggtacagaaggttttccatgtggaggtgctgtaatccagcccggagctcactctcacccaagcacttaagaggctgcacctgactgtgagcacctggagatgggcaggtctactttcctaggccccaaagcagcagtgtgtgactagaggtgctgtcaggtcacccaccaaggagctggactcattgaagaagcatccaacgagcaggatcctcaatggcagccgaatcatggattctggcctttgtcaagcacttcctactgtctaggaacagattggaggaaagccctactgggcattgtccttatgccaccttccagctgctgcctactacagcagtgaagaaataagcactcataggcaggatgtgcgtgtcactgtgaaataagcgattaattacaaagtaaagcttgtaagataagagattatttcctttattcattgaagagaagcattgattaatctgataaggtcaaaatcctttaagccagcctttattaaacaccagcttaaacacaaatgcaacaacatcaggaaaaagatgttatggaagtatataaaaattaagaagacagaaatattaaaacagagtaatgttatatcattctatatcagaagttagaaaatacattccgtgaatggtggatagtgtgtgtgtgtgtgtgtgtgtgtgtgtgtgtgtgtgtgtgtgtatgcatgtgtgtgcacacctgtatgtggaggtcagcagttgatatcaggtctcttcctcaagctaccttttcctcacttgttgagacaagatctctcactgaacctggcactcactggtttgggtaagctgtctacagagtaagtccagagagtctccatctccccagcctgaggattagcagttcacatcacagcagcacttggcttgaccttgaaaggactgaactcatgcccttgtacttgaatggcatacaagtactttgtagactgagtcatttccctatccttcccgtttgtttttgaatacctctgctggatgtcaaactccacataaggaattggtctggttgtgttctattgaacatacctgtacacacaggttactacaacaaagaaaaaaacaactgaaacctgggcgaaatacttgaatagacatttttctaggggagatgtacaattgccaataagcacataaaagttgctcaaaatcactaaacattggagaaacataaaatgaaactacattgaagatatgcctcacacacatcagattagccactatcaagtagtagatgatggtagacttggtgattatgcggagtaattggaaggcttttgccttgtcgctaggaatataaaatgctacagctactgtggaaattagactgttagaatttgtttcttaaaaaaaagtactatatggggctggagagatggctcagagattaagagcagtggctgctcttccaggattcctgagttcaattcccagcaagcacatggtggctcacaaccatccgttatgagatctggtgccctcttctggtgtgcagatttgcatggaggcagaatgttgtgtacataataaataaataaaatcatttaaaaattactatatgatatgctacttccttttcttgatacatactcaaagtaatttgaagttcatgaatacacacacatatgtatatattttgtgtgtgtgtgtgtgtgtgtgtgtgtgtgtggccccacgtgcttaggcagaatattatgattgtcagagcatatggtagagactggtctcacttgtaggtagatagagaaagacagtgtgatttgaagggtctcaagactacctctgcaaggacctgtccccagttcatcttctcttacagggaaagtccaggtgattgggcagctctgctccatggaatctttcagggtctcagcctctcttcatctttggtctctccattccctggggtgttcccctttgtgatgttacaggagaaaatgggttcaaggcctgctgataccacctaactaagagagattgtgtgttttttgtatttcttgttgagaagtcccaaggacatttctggataagggcttctgaaagaacaaagggtatagttaatttttgataggacagtggtcacttgtagtcctctgttcagggctttgctatcaggaagggcctttgggagagggagagataagctccctgcctctgctctctgtcccacactcctgtccttagatgaagttacatttcaagtatgggaaaaagagagagaaaacaaatccagatcaaagcaggcagttccccctatgcaggtgaggcagaggccaggtacatcccatggttgaggtacagtttgctatggccagtcccaagatcacctaaaataatgccatcttgtgttatattgtactaagaacagcatgtgtgaatggtgctggttgcacattgtgggggacaagctaggcataggttcacaagacagacagtatccgttttccctctacagaatacctttttgatgtgtatccccaactggagaagcattgagactcaagggatatagttggtagattgagtagacatgtaggagcccagttggaagaatttctctctctctctctctctctctctctctctctctctctctctctctctctctctctctgtgtgtgtgtgtgtgtgtgtgtgtgtgtgtgtgtgtgtcttccatggatgcacaggggcatgggaggacatcagggctcctcagcactttccacttcattcctttgaggcagaatctctgtgtgaacctagtagttcagctcatggttttcagatggacttttagtcagtgaactccagccatcctcttgtctccactcattaatgctaggcatgagcctacacccagcttgttacatggatactgggatcagaattcaggtcctcatggttctgtagcaatcactcttaaccactgaaccatctctctagcctcctagttggaagattttcacactgaaatcaaatagggcagtttcctttactctcaagcttttctccctttattctctgggtgtcttattttgtatctgaaaggtaaagttatgcacttattttcattggtactcagtggtttcctttgtatgcagcacagtgagccatgcaaggatgacccttcatccaacgactaaatacaacagagagtgagaggcttacaagtgatggcatcacctgaccatgggctgtcacagtagccttcacttcacagccaatcatgggtcctccagagtccacttgatatgtacagagacttgggtactagaggcatcggcacaatagtttatggcctggagtcatctctccatccaatattctgctttctcagattctctttggctctggctctgacaggaatagccttagtgattgtgcaaatattggcatggttacgggaggcatggactggagagctcaggacagcagcccaaggcctgctgcacctgcctccttggtaacagtcagctctaggcctctgaacactgtaggaattatctgagcaggctctcctggtaagatggaacaaaacacacccggtgtctctttgatgatcctctgtagcggggctagatatgaggcagcttgggcagagtgagatcagcctgaggtcctgcatacaacaggttggacctctactttcaggagttcttagggctggctcagcagcccaagctgcctctcttccttttgttcatttcatccaggatttgccaggtcactggatgaggtctgggctctctgttctgctgcactggtctgttctggacctccttgtcttataactggtagtttctgtgtaaaccatccaggaggnnnnnnnnnnnnnnnnnnnnnnnnnnnnnnnnnnnnnnnnnnnnnnnnnnnnnnnnnnnnnnnnnnnnnnnnnnnnnnnnnnnnnnnnnnnnnnnnnnnnatacaacaggttggacctctactttcaggagttcttagggctggctcagcagcccaagctgcctctcttccttttgttcatttcatccaggatttgccaggtcactggatgaggtctgggctctctgttctgctgcactggtctgttctggacctccttgtcttataactggtagtttctgtgtaaaccatccaggaggaagtctgtaaaggagggcactgggcagagagggcacagaatgggagccctagagccaggctgattccggccctgtcccagggaccagctgtgtgagcaggaggaaaccacctaaccccacctgcccgactcttgctgatagctttagctagtcatggttagatagagcctgcaggattattaagagagttgtctgaatctctagtgtataagccccgcctccagcctcccccccccttttttttttttacaggaaattgaagaattcgcattccagagaacctgcattagagcccacagggaaaggttgttcatagagtagagctacttgagaccccgtgggaacacaggcttgcttgcattcctgttatctcctcactcacagggcctggaacacatccctccctgcgtgaagaccagttgcttctcccagacctgtgcccacaaagatggctgctagctaaggatgcttggggcaacaactgggaccgcaacgggacaagagatgggattcattctccttatgatgttgggggccctcgatagcagccattccccagtcaccctggccccattttctctttctttctctctttccttcctcttcctgaccacaagatctcacctgccctcctttttattccctgatccctgtcccattcttgccttttaaaggctcagcttcttcttttcctctaacaaagtgacctcctgaagtgactatccctgaggctggcctgcctctcttgtctggcagtggctgtgctgtgctgaggagcctggtcggtctaccccatcctctctagtgatcacctgcagtatggctgtgtcacctggagtattcctctgttacctgcagtatggctgtgtcacctggagtatccctgtgttacctgaagaagtattctcagtgaagtccctgcatggctctgtgtggtccccataaagcttgagtcacacttgctttggctgtcatacttaccagctttcacccattgcctctaaggactgcttgatgactctaatagtgtctggttcacaggaattctagaggactaagaagggtaccactagagcaggaggccttcatagggtctctagaacatgaagggcaccttctgtggctagaatttgttcatgccacagtgttactgagatttgcaagttaataaaagtcaagtctgaaaaaaaaaaacaccatgatttcacaaactagggaaagtctcctcttcttcagctacattttttaaaacacactcaaaagcaacacaaacacaaaacatgttttttgtttgtttttttttaaatcaagattggagtgagttggtggtgcattctgggagagacaggcatggtgctgcattcccttaatctcagcacttgggagctgaggcagcagaaaagaagataattcatgaccagcctgagttacccagagtcccaaggccagtctctgaagccatctaaaaggagaaagaagaaacataagacaaagaacactcgttcctcaggaatttggggcaaggttttcaagcattgtaaagagacacgtgttccatcaagtgtcataaattacaggtccacatgcatggcctggctggaagttatgcaatagagaggattataaatcactgctcctttggagtctgactcacccccagggtgatggtggagacaaagaaaataggatcttggttataagcttttgtacttgtgctgggaggactgggggactagggagggtcaagattggaggagagcatctgaacaagggggcaactagggtgcatggaagataagtgtgtacttttccttttatgaattttcttaaactctaatatatcaaattaaaaaacagaaaaattagatacatttaccacttgacccaggacacacacacacacacacacacacacacacacacacacaccctagttgaagttccattagaaagacttatcttgtccagtggtggtgcatgcctttaatctcagcacttgggaggcagaggcaggcggatctctgtgagttcgaggccagcctggtctccagagtagttccaggacagcctccaaagccacagagaaacactgtctcgaaaaataaaataaaaattttttaaaaagacttatcttgtgcatatgagtgcatttatgttatcatgttttccagttcctcatttttctcgtattcacaatacaagagataattttgccctcaggacacatttgtcaaggtcccaggcattctgaattgtcatcactgtgctactgacatctagactcaagggtagataacagcagccccacagcaaaaggggagcagagccacagtcaggagcaggcaagcccagccccgccttttgctttaggcgcacagccaagtcaccacgtaccgtctgagctcaagctgcattggctctcacccatccctgtccctgcggggtgggcctggcccgccccctggactccagcattggtcgaaactgggggtggggaagggcggtctgaagacctgacaaagccaagtcccggtctctccattcctggcggctctcagaaagtccaggctagtctgacactgagcctgtcctttcagaccacagaatcatgcccatgacactgggttactgggacatccgcggggtgagtgagggatgcgaatggagagtaggacttggaggaggggtaaggctacacgcagtagatgggcttgctgaggaagtgtgtgtgtgtgtgtgtgtgtgtgtctgtatgtgtgtgtgtgtttgtgcgcgcgcgcctgcgtgctcgcgcatggagatggcaaaattagggcagggaggtggggactcatctggagggggtaaagaatctcatcttctctggtcctttctcacagctggctcatgccatccgcctgctcctggagtacacagactcaagctatgaggagaagagatacactatgggcgacggtgattgcaccttcctagtcagatccctgtcaactcctgcccattgacgcccaacaacccacatctagtccccttgttgctcagctctgcctcttctttttggacctagactgtgcccctttcagaacccttcattgtgtagtttgctctaacaatggaagatgctaagggaagattagagggtcctctgtatatgtaattggattccattcccttcactcttggctaaatctattgtaagctttagtgatgaaggagcccacagaccttacaaacatccttaagcttgcagggtgagactggcttgcaggtctactgccttagatgccttgggagggtcttgggaaaggtgactgaacacatggatcctttgatttcatattatcttgtccaccacagctcctgactatgaccaaagccaatggctgaacgagaagttcaagctgggcctggactttcccaatgtacgttcatggaaggggaggcttggggaaggtggtaatgtccctattttgtacagatcaggaggtctgggaccagtccttctgctctcatccacctatccctggttgttcacaccatctttctgagataggctgtgttccagctcttccattcagtgtgcattgtgttcatggaaagtttcccatgcctagtacactgagtgtcaggccccatgtctgtcctcacccaagtaagggacgctgggacctcatatcccacctgactatcctgcttgcctatccagctgccctacttaattgatgggtcacacaagatcacccagagcaatgccattcttcgttaccttggccgaaagcacaacctgtgtgagtggggctggctgcacagtggggatggtggttatcctctttggctgggatgggatgctgagagtgagtctgtgctgtacgtgttgcaggtggggagacggaagaggagagaattcgtgtggatattttggagaatcaacttatggacaaccgcatggtgctggccaggcttcgctataaccctgactttgtgagtcctactctgggctggatgaggtggggggacaggagcttgtacccttaccttttcatctgttctgtgtgtttaacatctaaactttgtagcactgctcacctagaaatggtgttctggactgcagcagtcatgtggcacagtctggtggctgagatgggactgtttaaggcattcctggttatctcaaaatcaaaactaccaaaacaaaaccaacccttaaaccaaccctttcatgagggcacgcgcgcgtacaagaacacacacacacacacacacacacacacacacacacacacacacacacacgctgccctcagagtgaccctcaaacctcagcgtcttgtcaggtgaaaaccccagtgaacttcactgcctttagtaaccagaacaaatgctccacagttgagcatcagcacctgggtagtaaagactgtttagaatccttcagctctgaccacccatttccccgctgggttatgtcttccacttgactttacatcatcactgcttctacagtccacactcaaacaatgagaaaaagtggtgcagtctggaaatagaagggtgtcattacctggggacacttcccaacaagattcccagagccatatcccgatgcccacagtgataagcagatgttcccagtaggcaattcatagccaatcaactgtctccttctttcctttcaccccctcacactcacttaatcttttttttttttttttttgaaagtgcaccaaggtcctatctttctcctgtcactttactatgtagaacattcaacttcttttccagagtgctttagttgtttgcttctttgactctgcataacatctgagtccagagcctgcccacacagtcccgagtgtgacccacaagagtggttctgaacatcggtggtgagtctcagggacagagtattcctgtatggcttctcatcacttctgatattggagctggtgcctataggatctaatcagtggtgacataataaattaaagtctggattagcccaggccccatctggggaaggtgactgcacctctgcccaggtggggcctccgcagccctgtgagccaggcctatgccagaatcttgggactgagggtggtcacagtgttttctgctgtaggagaagctgaagccagggtacctggagcaactcccgggaatgatgaggctctactccgagttcctgggcaagcggccgtggtttgcaggggacaaggtaaacagaggggttgggaaggaggatttgctgatcttcccaagctaccagattccagcacactcactgtcagcttcctgcagatcacctttgtggatttcatcgcttatgatgttcttgagaggaatcaagtatttgaacccaagtgcctggaagagttcccaaacctgaaggacttcatatcacgctttgaggtgatgctcctaattctctttcttcttggatggccttcctttccctggcaggtccttagtcctgaactcaaataaaaacatcagaacagtaacatttactgggtgcttgctctctggcaggacctgtgcttagcatcttttatcttttcggtaaaatgtatcagtatgatcaacttacagggcacattgtattgtgagtcccattggatagataaggaaacagactatagaggctatagagggaagcttggctctcactgcacagccggtcatgggtcccccagggtctccttaacatccacagaatatattctttcagagacttggcaactgcaggcagtagaaggacaggtttgtagtctggaatccccttatggcaagtaatacatcttctcttgttagtttgtaccaactctggctgtggtcctgatacaatagcctttgagcgtgccagagctggtgtggctatggtagggaaggatggaagagctgagggctgcagcccaaggcctgctgcacctgcctccttggtaacagtcagctctaggcctctgaacgctgcaggaattatctgagcaggctctcctggtaagatggaacaaaacacactgggtatctctttgcatggtcctctgtcacggggctggatatgaggcagcttgggcagagtgggatcagcctgaggtcctgaatacaacaggttggacctctactttcaggagttcttagggctggctcagcagcccaagctgcctctcttccttttgttcatttcatccaggatttgccaggtcactggatgaggtctgggctctctgttctgctgcactggtctgttctggacctccttgtcttataactggtagtttctgtgtaaaccatccaggaggnnnnnnnnnnnnnnnnnnnnnnnnnnnnnnnnnnnnnnnnnnnnnnnnnnnnnnnnnnnnnnnnnnnnnnnnnnnnnnnnnnnnnnnnnnnnnnnnnnnncttggcttttgctgagatgtaggtacagtaagactgatcttggaagatcaagtaggttttctgaatatatatatatatatatatatatatatatatatatatatatatattctatatgggtacaaagcccattgcccagagtttttataggaagctgaatagttccctattcagaactctaatattagcgcctacagggaaagctgttcctcgagatggggggtatgtgtggctgcttatcctggcaggatgatgacctgagctcctgccctatccttgtcactcacagggcctgaagaagatctctgactacatgaagaccagccgcttcctcccgagacctgtgttcacaaagatggccacttggggcaacaagtagggccttggcagggtaggatgtatgattaagatgccaggttcccttggtttgcagggagccttgaggagcagccaggaccactgcagcccagagccaccttttccttctcctttctttccatcccgttccagaccccaagcctcaccagctccctctttttgctcatccaatcctccatgcagaggctctttaaagtcccagcaactcctttccatacccttctaaagctaaagtgcctcttacaggctctcatgtctggatacttggttcctaaatgatggctattttgaacaattatgggctctctggcaggtgggggtctatctggaggcaggaggtttctaggagcatagactttgatcattgtagtcaaggacttcttttgcttactctctgtttcctgatacaagaagatataagcaaagatgtgctgtaaaggagcatcatccctgcatctgtgactcgcctctcctgcttgccttccctgctactttgaactgtatctcctgaaccagaataaatcattctccccttaggtcgcttttgtttggtattttgtcacgacaacaaacaactgatgagaagcctgattccaggggatcgtctactcccttgtagacgatcttcagtgcggaaggccatctctttggtccttctgaggtctctaagtcaaaagccagtgtggcttttgtgtcacttcatatggccatgtggcattcttttatagacattgttaatgtaaaactttgtcttctcagattcctccatcaccacttcttcacttgtattatgctcttactcccaaatcagtttaaaaccacactgaagagtaagcccctagcggatttgttcaggatctcaatgattcacatccccggtaccagactgagttactttatgggtaggcattcgggtcaggctcggttgggagaatacggctgctcaacaaagacctcttatccaaaaacaatgtatctagaaagataacttacaaaacagatcaaggcttaaacatgcattcctaaaagtgaatatccaagtagcctattagcctgtaaaatcacaacaaacactggtcattgtaaacactgtaatatcctagtgctgagtcactagaatggctaagatccaaaaggctgaccatagttggtactttatgaagtgatgggactgtgtgttgctgggagaataaccactttggaatgttgacagtgtcaactagtgttgagcaagtagtgacctttcacccaggactgtctcgttatgcttttgtcttccaaaagctatgaaagacttttatgccagaatgtaggaaacaacttagttttcaatttcatcagcagaaaattaataaatcaagtgcagtttattaatataaagccattatcatgtaatgaaatagtatgtcataatttaaca

SEQ ID NO: 24 - DNA, 85390 bp, Cricetulus griseus
  >scaffold_16 dna:scaffold scaffold:CHOK1GS_HDv1:scaffold_16:10909381:10994770:1
  misc_feature 10289..10388: /note="n is unknown"
  misc_feature 13863..13962: /note="n is unknown"
  misc_feature 33724..33823: /note="n is unknown"
  misc_feature 38172..38271: /note="n is unknown"
aactgcccaggctgtcctggaactagctcaatagaaccgcctgcctctgctccccccagtgctgggattaaaggcgtgcgccactacgtcccggtttactgtgagttagttcttaatctcctaaattttaaaaacagatttgcaatttttttccactttttccactcagtgacttcgaaagtaggcaaaagtttaaagatgcatttacatatctgatccaggacaaacttgcatttgttagggaaagccgcagggcctggcaatctcacgccgagtttgccagcccccgtaaattcccgaactcgggctgaccagctccctgctgctggcagccgcgtccatcccgctcctgcccggcctcccgggtctagccgctcgcgcacgtgcgctgcccgcagtaaccggcgcggggaacccttgcgaaggaccgggtggtgagggcgggaagcggccggatctccccgccgagccggaggccgcggggaactttcttcacgcccggacctgacccgatcaaaagggcccggatgagagccggggagggcgcccgggtccgcgaccgcgcacggcttaacaggaggcgcgggcagggacggcggggacgacagccgcgcgcccggctcaccgtgtctgagtcggtgttgagatgctggaaggtgagcgcgccgagcacgaagccggacagcacccccaacgtactctcaccctcctccataccgccgcctcagtcgctgccgccacagctacgaccgcggggcatgacgggaggccggggggcggggcctgagtagggcggggcctcgcggcggagattgcgcctgcgtacggggagcgcggtttttttttttttttttttttttggtttttcgagacagggtttctctgtgtagctttggagcctatcctggcactcgctttggagaccaggctggcctcgaactcacagagatccgcctgcctctgcctcccgagtgctgggattaaaggcatgcgccaccaacgcccggctgggagcgcgtgttttgaagggagcgcgagcgtcctctagcccagggagggtgattctttgaacaagttggcttggcaaaatcctattttcgggtggtttaaggcaactaatgattgtaaaatttgagaattgcttggcaatattttaatgctacagacatgtcccagtttggttttctaactgtattacacctagtgaaacttagaagaccaataaggtggggtggtggcgagggaattgtcttttctagtatattgcagtcgtgttgcactcttctgtctacgtgtgtgtgtttctttcgtttgtttgcttgcaattaaaaacttaagggctgaatctagcttaaagactgcacaggtttttaacatcatgagcgtttgacgataagcacaatcatactgtactgggccatttgatgtcagtaaagtgagtgggacgctgtgagatggacacgtatttcacatgtgtgcacatacacagttatgaaaagcgatgctttttaaatagttgaaagtgggcaagataacagactcctgaactgaattagaattgcatgtctcagttttgttgtgcaaccaccaggattggcttgtctgtggcaacaaggaagaaggaccagctccactctgttgccactaatagcttatagggttctatttccccttggggaatttcaggttaacagtatgaagcagaggaatggtttattaaaagacattttatacatggattttaagcaaggggttaacagagatgttcagggaaagcctaagatttatttacttctcatgtatgtatatacgttcagcctgaatgccagaagagggcattagatctcatagatggttgtgagccaccatatgggtgctgggagttgaacctgtgaccttgggaagaatagccagtgctcttaacctctgaacaatctctccagcctcgggtgtgagcttcttaaaggagagttgcacctacatcacatatgtatatagtagatatacatttttgtggtacatctcatatttatcatatatatatatatatatatatataattatacatgacatgtatattgctgtgacatttaattttcagaaaagtagtatgtttatctaaggaattacataaacatgaggtcaaggttgattgtgacagcagaaggaataaaaacaagagtcctagatgacaaaagtcccactcagcatgtagtttttctgcccattaacctctgcacttcctttcccttatcttctcagaatactaactcttaaatgaatctgatttgcttccaactctcattccctgaatattggcttttaagcatgtagcagatgaacttgggtctggtaacatttcttcggaacaattgcattagttacttttctactgctatgataaaataccatgaccaaggcaccttagagaaggaatggtttatttgggcttacagttccagagggccaggagtccatcacaggtcacagtggtgagcatggcaggcatggtgactggactagcaagctgagaacatcttgaacctcatgtaagaaggagagagagagagacacacagagagagagagagagagagagagaaagagagagagagagacagagacagagacagagacagagagacagagacagagagacagagacagagacagagagagacagagagagagagacagagagacagagacagagacagagacagagagagagaacctgaaatggtacaagtcttttaactctcaaagcctgcccccactgtcatacttcctccagtaagaccacactcctaaaccaaccctaacagtaccatgaattggagaccatgtattcaaatatactagattatgggagcatcttattaaaaacaccacaataatatctgatataatttgctctgagcatcctcactggactatattactgtctgaaaaaatatatcaccatgttgtgacaacacaaatgttacacaaaggcaaaacccacaaggttacatacttcctgcctttgtccaatcaggggcaaacatacattctgacatatttcctgcctattgcctcctccctacatttgatcaagcacatcctatgcagttggagcaaccaagcttgtttacagctgtgaaaatacatgacttgttctcttacatgaacaacagccccagcattccaggaagttatctgtccttgggcaagtggggtatacaggttaggggcatgtttgttcaagagatctcttgggcacagcaatttaaacttaaagcataactttagctctcacagaatgagagtaaggagtgggtatgagtttgtgggtagtatggttagagaaatctaatattgttttaatcccacccctgtgcagaaacaaaatcggagggcactgctttgagtttgattgtacaaggtagctgaaagggaagccatatgtcattaagacctcacttgcaaccagagtgagtggcctgtgtcaagtgatatgggtacacggttgctgctgaaagttcatcgctaaagcttcagggattggtttaagctgtgttagctaatgaaaacattttcaacctcagttaaacagcagagagccttctttaactgtatcaatcaaatcatttggggtgatttatttcctgtctctgaagggccgttgacctgtgcagttgcatcatgatccatccatttctgccccaccaaccttttataaaaactttaatattctgctgtcttcttcagatttttagtgatttgggggtgtgtgtctgtgtttcagtttccctaaggggctgcaagttgcagagaggactcttcgattccttgagtgtttcttcatctgatatcaggaagtgcaatgaaacttcaccagctgaactaatctcaataataataataataataataataataataataataataataataatagtgataatagagggcctggggcgagggtgatgctcttcaggttctcccaggtccttgatgtttggcagaaacaactttctgactgaagcaaaattagtgagtttatcggttaagcaggaaggcgagataaatcagaaccaccccatgtgagcgtcaggagaggatgcatctgagcaccttggcagtagccgtatttgactcagggactttgaaacaacttaattcaaaaccagatttagatattaagggaagcataggctggtaaacttatttttcttgcccgaagaattttgtccttgaagttacttccccaagtcatcatgaaggcttgcagctagagtgaagaaacagcgttaggaacagcttttgaaaaaaaacaaaatttttttttttgactcttcactagggcacctagaagcagtgtgaaaacttgacatttctgcttttgttttgtgtctgtctcctttactttgaaggcacggggataattctcattgttcttaaccttttttcttgagtcaccttggatttgaagaacagcaaagctttgcaggtcagagcaactcaacctcaacacaggtaaggacagttatctagaaaggcaagacttcatctggccgaagaaatagttgtttctcaacaaccactttttctcccttagatgaaaggacttcttgacatcactttgcaggactggaggtttcacccggtcaagaagactaggcctgcttagttatgaatacatcttgcctctggcccggttcttcctccatttaaacctaaatctatcctgaaggtgatcttggaatcatgagacgcctatttgtttcttattccaatggtgtcacactggatcatctccttttcctgctgtcccccttgtatttttcgcttggtgtatttttaggtggtgtattgtggtggatgagcaaatctagccttttagggatgctggaggtcatacatttgccctaaaaactctggttacactatgagaaataaaaggttgatcaaatggattcctgtatatatacatgggtcacaaggaggtaggtgaaagggttttgcagccaaagagtatcttggtggtcaggggcccaaggaatgcaagccatgaaacagatctcatgcaagagagttattggggatggggaggatacaaagttgatgattctgagctgggatggaaacaaacagcggcagaccaagtcacgatggagggtgcggagcatgagcatagggaaaataaggcaacggtggtggtgccagaaacgtgtcacattggccattagtaatgaggggctgtaggctctgagtcattgaaggtggggaggagggttctgaaatgtgggtggttcttaagaagggatgactggtgagacaggaatgagggtgccatgctctctagaccacttcctgttgtctgggagcaccgatgtctttggggacccaagaaagctggcatgctggccaagactggaggagcaggctgtctccctcgctgtcaatgctctgtgggaccgtctagtgctagggaagatgcaggttgcactggagcagtttgtagtctttggttggttggaaacctgcttgaacagatatacattaggggcagaaggtaaagttaaggagttttaggggaacatttttatcttgggtatatatttgaaacttccaggcccatagtcctggtagttgggggagtggaatcccaagactagggggagagagagatctcaccctcaggaataggcagatggggaagcgtggtactgatctggagtccgtgtgacctgtgagaggtggatccaagtcaacccccaaagctgatgttaattttttaaagtttacagaaagagatgaaaagtttcagatatgttagcatcctcactgtttgtcatctatagtgaaatccacattgtagaagagacagtcaacccacgcctctgactcagtagagagcttgggaattcaaaactgattgtgggttaaaagcgttaacacgctttccagggctgaatgtgtaaatgggacagagatgttttaagtgtgactagaaactcttttaagtctatttattcttagaagacaaccaaaggaaatttaaagtcttgaactttatgactataatagtatcagtttatcagaactccactgaatgatgttagttttagtatagggaggaaatataaaacatttttttttatttttcataaaccttaaatcattttcttagacctttacagcttgtatttgaatgccttgaagagctttcttaaacgggatggttgtggcacatgcctttaatccttctcagattaaagcagtggtcataggtcttcttcaactgccacacagagcagtcttggccttcggctgccagacacaggtctgagagattttcctgtgaggaaggtatttggaataactgaccttactttgaccaggcagggcagggcaatcaatccaaaagtgtccacaggttgggcagaggcctagcagcaagcgaggcttaggaccattttccccagtggttagggttaccacaattcaggtggagtcattgtgccccatctaatcttctttagagaccatagggttcttggtatgagcttgtatgtctattatgggaagctttttttagttaaacatttttttttttcaagacagggtttctctgtgtagctttggagcctgttgtagcactcgctctggagaccaggctggtcttgaactcacagagatctgcctctgcctcccgagtgctgggattaaaggcgtgtgccaccaacgccttgcttagttaaaccttttaaatgtcatattcagcagatctctgaagagtttgaggacgccaatctactaagtgtaaggattcaggggttatgctgacctgcccctgtcacctgacagaatgcactcaggcagtaccctggtcagtccaggtgcaaaggactcctttaaaagaaagacctctgcccacttatgctctcttttttggctcctctctttccagctctctttctgctttctctctccttgcttcctctttcctgctctctctccccactccctctttcctgctctctttctactctctttcctgctcccctctttcccgttctctttcctgctgttcccctctttttttttcttttttctgtcctctctctgtctctgtgtctctgtctttttaccttttttctctttccttctccttcctaataaaactcacttaagcactgtctgcctggcatgttagtccccctcccccaaccttggtcaacctcacctgccatgaaatccaccaaagttcaccacactttatcataacaccaagtatacctgatttaaggtttaaccttgaaaacatactaacttatctctaacagtttagttgccagcttttataagactagggttttggggctggagagatggctcagaggttaagagcaccgactgttcttccagagttcctgagttcaattcccagcaaccacatggtgtctcacaaccatccgttatgagatctggtgccctcttctggtgtgcagatatacatggaagcagaatgttgtatacataataaaatctttaaaaaaaaaaaaagactagggttttacagccttatcctgttaggtttagcctttaaaaaaaataacaattttcaattgaaactcttagtatcaaaataaaactttaaacctgcaaatagctgaagattaacaaaatgagcaaggacaaacgaactagacaaatcttactatggacctgagtagaccttaggaatccattatcaaatatgccttatttatcaaacctatgttattactggtgttgaacagttagcaaagacataagtagtaagacatacatcttaagtcagattttgttaacccaggtagacatttactatcttgccttcttagaggccccattgggacaccattaagcaggattctggggtcttatctggtgtagggagagaccccgattcctgtacctgtgaccatgcccagttggtcacaggtacatagaaggcatatgaaataaagggctgagagagaggacacaagttctcttggttccagtcaggttacagagagcagctgagcttgatcctcggagctggaacttggagttatctgtttcttgtgtgagtgacttttccccaaataaaattaaccatattaccctagtcccgtgtatcttaatctgttcatctacaatctggggctcattgaagaagtgtcttggctattatattatatggtttgaggtggtaccacagtggattccgtggcgggggtggtggtggaaacacaccatcaggcagaacttatatgggaaggaagttttattgggaaggaaaaggagtgggggaagggagagagggaggagagagagagagagacagagagaaaggtgggaagatacagagaacaatagagatctatctgccttctcagagagatggcagaaagagaaagtgggcagagtttgcctcttaaagtaacctttgcaccttcgtgcagacatagtgacttagcagccataagaccctgggcttggcaagagggcataatgcctgaatcctaacactggctatttagactgtcagcagcagactggagagaaagacactggtagcatatatgtgccatctctagaccacacaatcaccaaagctctttctaatctgaaattccagtgttactgatatttgggtcagagcctagcaaccccaataaaagccacctgtcctcaacatgccaattaagcaaacaagtaattgtgaaaaatggataagagatttcttcaatgtggccacattaggaagaggacaaagaggtccattgatacctctatgtgcatcttcagggtccaatgctagaaataggtttggggtctgtggtggtttgaaagaaaatggcctcaaagggagtggcattattaggaggtgtagcattgttggaataggtgtggccttgttggagaaagtgtgtcactgtgggatgtgctttgaggtctcctatgctccagctactcccagtgtctcagtccaactttctgttgcttacaagatgtaggtctcttagctatgtctccagcaccatgtctgccagcatgctgccatgtcccactgtgatgataatggacaaaacctttgaaactataagtcaccacctcaatgaaatgttttcctttgtaagagttgctgtggtcatggtgtctcttcacagcaatagagaccgtaagataggatcacaaagagacatccaccccaagtgaagagtctggacaagcaactttactctggaacaagagggtgtgcttgaagagcacacacccagggactggaagggcacttgccttttattctaacttaggtggtgactgtgtcttttccccattgactggggtccaacctcacagtccttttttttttttttttttccttctgtaacattcttttgattttttaaacttattttggaattaatattagcagatcaaacacatgataggtatttaaatatccaaatttcagatccatagttatcaaatttcatacagattactattctttagtccatgttttttttaaaagatttatttatttatttatttatttatttatttattatgtatacagtgttctgcctgcatctatcccaggccagaagagggccccagactacattacagatggttgggagccaccatgtgtttgctgggaattgaattcaggacctctggaagaacaggaagtgctcttaacccctgagccaccacctctccagccctagtccatgttttatgcactacacaggacatataactaaacattatcgttatgcatctgaaatccaagcataataggctgtcatatacttttttcatttttttttatttagagaatactttattagtttttgtaatcaaacccacgtagataagaccttacatatttaatacagtgcgttacccctgtacaaatggaaaaaaattaagttcaccattctagaccaatatggctgttaatttctgtacaatgccaactcaactgggatacttttttccatagttgacagcacagctaaagtttccacaaattcaaattatatatgtatatatatttatatttatataaaaagaccaattatagcagtatgttgtgtatcaatagcagcaacagcttttccaggttctgcagtcatttgaacaaaattgtagagatatccagcatactccatttaaaaaaaaaaacacaaaaaagtaaaaaacaaaatcccagaaaacagcacagttctgttactcttgtggtacctggcaccgtttttnnnnnnnnnnnnnnnnnnnnnnnnnnnnnnnnnnnnnnnnnnnnnnnnnnnnnnnnnnnnnnnnnnnnnnnnnnnnnnnnnnnnnnnnnnnnnnnnnnnnaaagcattggtccataggaaacaaagaagggaaggaaagggggccatacctccaagaagaaaagggtcactgatcaaggccatcaaattttgggaatgccaaactttgtgtaaacaagggttttactgggtgatgacaattgaaacatttgcataaaaatcttatgaggtgggaagttaaaaatatttgtattctggcccagatgtggtggcgcccacgctttttatcctgcactgggcagtcagaggcaggtggatctctgagatcatggtcagcctggtctacagagcatgtttcaggacagccagggctacacagagaaaccctgtcttgaacaaaaccttacagtgtttatagagaagtctcctgtttggcgtaccttagactagcatgagattcaggagctgagatcaggctgtgtcctactctaagttactccatgttgtgtgtaaatcgtagtttatgccttgccctaagagaccccatgacacccccaagtgcttcctcccttcttccctccctccctccctccctccctccctccctctctttcttcctgagtctctgtgtgggtttgtttgtgtctccgaatgcctgtctatggtatggaggcagaagaggtgttgggtgtcttttgtcaccccctgcctattccattgaggcacgatttctccttgaacctgggacttgtgttttctagggtacaatagatgttatcaagacccagggatcctcctggagaaattccactttagaagtagcttcaactcggtcttgaggataaaggatggctttggacctggttggacacacgaacagcaccatcagtccagagccacccacgaagcacagactgacaagtgacttagtcctgggaattgaaatctattccaaactccaaatgcatcaagataaattacagaagagagtagaaaaagaagaaacatttactcgaatgagctactgttgtgcccaaaatttgaaccccaaaccaccaagagacccattcctatacaaaagcagagagtcttttattttttttaaccagttaactgcattaactcgggccctccatccgttcctcatggcaggtggagtgagaaggaccccaaggaacttagaggtggggaatttattggggtagagcaagggaagtgtctagggggttctcaggattggtgcacttccaggcttggacaacctgtcctgagttgattggtcaactggttgctatggcctatagccctcccagggcggttgctatgctctgtatgtcagctaacttctgattggttccttgccgcatggagggtatctgacctcctagtgactaaggcaggtctgtcaaggtcagaaggccagaaattcagcaacaatgtgctgagtcagaggcttacatcttgctgggtccatggctgtcaaaacagggggctgggtgagggtcttctcccttcattacctagatacaggttgtaattcacaagcatagtaaatattttggaacatttaacaggtgaagcatcgtgctaagagtctactgttaatcccaaacatgggaggagaaagaccaccgaccagaatcatcacagccaaattaattaaatcaagattttttttttattactgtacatgggctgtctcccctaaggcggtgtttcagaggtcagcattggatgtggggacacaaggctttatacaagagaagatgattcccaaatggagggtttagctggcaaaataggtggggttacaggagcagaacatcaccacaagttagtcctgaaggcctcctgaaacaaagacatggttgcaaggtgggcataacaaggtagtcatatgtggacatagaaccttttgaaaccaaggtaggattgcaagatggttataaaaatctcttttgttttttgtttagttttagttttttgagacaaggtttctctgtgtagccctgactgtcctggaacttgatccgtagaccaggctggccttgaattcagagatccaactgcctctgtctcttgagtgctgggatcagaggtgttcaccatcacaccatcaccaataccactattaacaactatttgaaacaaacaaaaaaaaaaacataattgccataatttcaaatggaaccatttgtagttaaggttacaagtgggacatagcctgattcttgagaaacagaggtttaattgtaaataggaatgaacctagtttgtctttactatgagatggctttcaaatctaagatgaggcagactggttcttcactaccttatcaacagttctctaatcataatccaggagtcgcaggaacctcatatttattttatttacatgatatttcttatactgaaataatttatattattacacgatgcaaattgcactttgtgggcatacattggtgcattttctcctgatttatgtccctctccagtcatccagcatctcttgactacctttaaaaagttgcttttgggggatggatagctcagtggttaagagcacttgctgctcttccaggggacctgggtttcagtacccacatagtggctcacagccatctgtaactctagcctcagaggatccgatatcctcttctagcctctgagggcaccaggcacagacatacatgcaggcaaaacagcttacacataaaaagaaatgaatgtatttaaaaactctaagttgcttttcacaagacatgggtagtttatgcttaggtagtcactgcctttctcaggaggctgatgcaagaggattggcagagcctcagacttcaaaccccagtgtggtcaacacagaggtgcatttgttttagttccatctcccttgctatgataaaacaaacaaagaaacaaaaccattctagcctctggatgtggtggcatgaacctttaatcccaacagaggtggagtgatcactgagttacaggacagccagggctacacagagaaaccctgtctggataaaactgaaaccaaacatagtcacaaaaccactctcaccaaaaacaatttggaggaggaaagaatgtatataaacttacaaattatagcccatcattgcagggccccaaggaggagcttgaggtgggaacactgcttattggctatattgataatgggagtcctccattttatcttattattttcttttattttatatgtaggagtgctttgcctacattatgtctgtgcaccaagtgctttgatagtgctcttggaggccagaagagggcatcagatcccttggatctcgagttacagacagatagttgtgagctgacatgtgggtgttgggaattaaacctgggtcttctggaaaagcagaaggtggccttaaccaccgaactccagcgccaagttcagttttacaaataactactttatgggagattagagatgtttttattactgaaatctatgaatgaatagaacggtcttacagggtgatgagtaagcttgagcaagnnnnnnnnnnnnnnnnnnnnnnnnnnnnnnnnnnnnnnnnnnnnnnnnnnnnnnnnnnnnnnnnnnnnnnnnnnnnnnnnnnnnnnnnnnnnnnnnnnnntagttgtgagctgacatgtgggtgttgggaattaaacctgggtcttctggaaaagcagaaggtggccttaaccaccgaactccagcgccaagttcagttttacaaataactactttatgggagattagagatgtttttattactgaaatctatgaatgaatagaacggtcttacagggtgatgagtaagcttgagcaagtctaaagacaatataagtcaactgtggaagaagaatgaggggcaagactaagagggaaggagcaactcttcactgactcccagaggtctttctttgaagctcacagacaggaggtcacagacaggtttgaccactcagtggagcacctggctgacggttcacttggagggctgggaagtggaatgtgggcttttaaatacttcagcctgggctgtctgtccttcttctgaggtttgtttgtccatgctgacagtctctccagagcatgttcagggcaaactccattcttctcgatagcctttgactaggagagtgagtcaggctcacttcaaacaggctccagtgatttctgataatcgcaccttgtgggtgtggtgagaatacctgagagaacagaaacaaaaacactttgtaaactatgaagtggctcctagttgccatcacccagggcacatcttgttagacatcacaaagggaaacgggtacccaggagaactagagccatgccccacagtaagtgtgtgttctaaaaacttgttgaagtggcctcagactactgaagcattgaacattccctaccctggtaccattagaaatgcaagcatcagtttttaccatttcttgaaaattacattaccgtatatgaaagtagaggtacctagcttttttcaaattcctttctctagctccaggtagagagctggcattctgagctgcccaaaagaagacaggagaaatgattaattatccctgtgttgtgtaagattcctaagaaattaaacattccaccctgcagggaagctccttatgcaggaaggtaaacaactcaaaatagcttcaggaagcccctaaacccaccatggtgactaaaaccctccctgccaggtaagcagtaatctgagaatctctctcagaagagcagagccaggctctaaagaagtttgagaccacaccagcttcctggaagaagcagaagccagcggagctggctggaagaggtttagagcaactgagttacctccaacctgttgagctgcctgcaggctgtgccgtgtgctcccaagttctcagctttgtgagctgtcacctgtgctggggtgggctttggtgatgcaactgtcattgagtcatttttgctcctgtaagtgatcccaatagaactcatggttcaccaagcgggactttggtggtatctgtattttggtctgttgtgggttccttgttcagactgaatagacatagggtttttggtcttgaaataccacctcttgaaataacatacttttccttcccagaagccccctcttcaggacagcccattacaactacagtcacaatatctgccacagtgcttgcccacttcttaagttacacacaaaaatgtgaatttttcttcttctagccccctccgtgcctccccgccagagcccaggcatgcttcccgaggttctgtgctttgtcatttctttctctgtagtctctggtctcctctccttccaccacctggctgcttgtcaatctcccatttcaggtgacattgttttttctcttcctcttccatttctcctggttgatgccaagatttggaatttgcctgccccccccccttttttttttgcttaagctctaagtaaattgttctcagactcaggaagacaaatacagtatgtattcacagtgtaaagcagaggataatcagactgacagctgtggagcctgcatgggacggagctgggccctctgcatgtgggtggcagttgtgtggcttggtctgtttgtggtgcccctggcagtgggaccaggatctgtccctggtgcatgagttggctttttggagctcattccccatggtgggatgccttgctcagcctcgatgcagtggggagggacttggtcctgcctcaacttaatatgccaggccttgttgatgccccatgggaggccttacccttttggagggctgggtgggggtagaggggaagccagaggacttgtgggagggagaactgtggttggtatgtaaggtaagaaaataaataaaagcaaactctcaaaaagaaaaaaaaaaaaggaaattcactgaaactgaaaaataaataaatagccgggcgttggtggtgcacgcctttaatcccagcactcaggaggcagaggcaggcggatctctgtgagttcgagtccagcctggtctacaagagctagtcccaggacagcctccaaagccacagggaaaccctgtctcgaaaaaccaaaaagaaaaaaaagaaaaaaagaaaaaagaaaagaaaagaaaaaaagaaaaataaataagttcttactggatcttaaaaaaaaaaaattgttctcaagattcctgtcgctgggcgttggtggtgcacacctttaatctcagcactctggaggcagaagcaggcggatctctgtgagttcgagtccagcctggtctacaagagctagttccaggacagcctccaaagccacagagaaaccctgtctcgaaaaaccaaaaaaaaaaaaaaaaaaaaattctgtcttctagctaggcattggtggcacacgcctttaatcccagcacttgggaggcagaggcaggaggatctgtgagttcaaggccagcctggtctacagagttccaggacagccagggccacacagagaaaccctgtcttggaaaaacagaaacaaagaaacaacaacaacaaaataaacgattttaattttgtgtatctgaggcttttgtctgtgtacctcaggcattcgtggtgcatgtggaggccaaaaggagggcatcaggtcctctagaaactggaatcagatggtcatgagacacactgtgggtgctgggaattaaaccgggggtcctctggaagagcagcctatgctcttaaccgctgaacaatctctccagcccctttcttttattaatgaaactaacaatctcaaaagggaatcccagtttcctttgtaacaaactgtcccatgagttgattaactaaagggatggagaagtttgtgaagtgttcactaggagcgttttaatcattctctctagaacaggctcctgtgcctgaactgtactgataatacagatttcatatacatgcacacatgttgcattatacacatatacatgcttataccatacaaatatacacatcacatcatatatatcacatacaatacaggtatctcacacacacatacacaaagatttttttttttaattgttttattgttctttgctttttgagacagggtttctctgtgtagccttggctgtcctggaacttgctgtgtagaccagcctggccttgaacttacagagattcacctgcctctgcttcctgagtgccgggcttacacacaaaggtttttttgttttgttttgttttgtttttgttttttgcttttcaagacagggtttttctgtggctttggagactatcctggaactcgctctgtagagcaggctggtctcgaactcacagagatcttcctgcctctacctcccatgtgctgggattaaaggtgtgcaccaccaatgccaatgcccggccacacaaaggtctgtttgtttgttttggtttttcaagacagggtttctctgtgtagctttggcgcctatcctggcactggctctggagaccaggctggccttgaactcacagagatctgcctgcctctgtctctggagtgctgggattcaaggcgttcagcaccaatgcccggccacacatgctcagtgggtaaaacactcactgtgcagctgtgaagcaccaagtctgagtccccagaaacatctgaacttggatgtgtagcacacacccgtaattctgatgcctctgcaatgacatgggatgagaggcaggagagagagtcatcttgcctaacatccacaatggtgaacaacaagagattgaaagtaaggactagggctggagagatggctcagagtttaagagcaccgactgctcttccaaaggtcctgagttcaattcccagcaacaaaacacggtggctcacaaccatctgttatgagatctggtgccctcttctgatgtgcagatatacatggaagcagaatgttgtatacataataaataaataaaatctttaaaaaaaaaaagaaagtaaggactaattaatacccaaggttgtcctctgatgcccatgtttgctgtggtgcaccagtgccctcatttgtacatacctgcacacacagacacaagatttaaaaagaaacaaatgtgcatcatttcttgtagtgagaatagtattctgaaccctacttaggttaactgttatcttgcagcaagctaccactgagctgttctgactgcaacaaagtaagccattcttgcaaggtagggtcgtatttgctgagaccaaccgaatcactggcaagtgtatggatggagcacataaacaggtaaccttccgtcttagggttactatctctgtgatgaaacagtgtgaccaaaagcaatttggagaggaaagggtttatttggcttacacaccctgagggaagccccatcaatcactaattaagaaaatgccctacaggcctgtctgtctacagcctggttttatggaccaattttcttaattgggctccctcctctcagatgactccagtttgtgtcaagtgaacataaaagcagccagttggccttcccagacactgttttatccaaggggagtctgcagtcacctctgctgctttaactagacagtgctctgaatccagccttcccattacctttcctgtagacttggagccaccgaagttgcagccagttggaggttggtgggtgttggtgagtttgaggacaaggcagttatgtgttgttgtttaccattccacaagttgccctcagtaaatggtattttcaccagcacaaatgaatcattttcttcattgttggtgcctttgcagtttgggagcagaggttaattttaccttttcccagaaaagccacacatttcttctatttaagtaagttgttctaattctacaacggaccaagattgccaaatgctcggtctagcaagacatggccaccgaataggtctgactcgattgttcagtggcttgagtaaatatttataagtctctggtcctgaagagaggtgacaagtaactgtaaaaatgcttatgttgctaagtaagggtgtcaaattattggtgtctgttcaagtggggcacctgttgacattaattatttgttcgtccatccatccatccatccatccatccatccatccatccatctgcttagcacatttattgaacacctgcaatgtacttaaagtatgcagatgccagtcaattgagagtagggccagacagtctgtgcaatagaactcatctgattccagtggcttggggttcagtgtgcccatgcacctttatgtgattcttgtccctacattatagtttctactggacttttttgtttttgttttttttttgggtgttttttggtttttcgagacagggtttctctgtggctttggaggctgtcctggaactagctcttgtagaccaggctggtcttgaactcacagagatccacctgcctctgcctcctgagtgctgggattaaaggcgtgcgccaccaatgcccggctcggcttctactggacttttatgagtttttttgttcacttttttcttttgtatactgagttgctttatgagggctttccatattaaggagaagcagattatataaagcccactcttgtaaaaacctgaaatactcagcggtgtgtgctccaacctgacagtctgatgcataagttagatttggcaagaactcgaactgtcttttcctcacttgatccaaatgtacagtgttagaaaaataaaaagtttaaccctaacagccttaggtccttcctaactttcagcacctttgatccccaggagctgtattgtcaacaacagtaaaatctctgtgacatagaggtagaactaagctcctagttgtagttcagagatttacaaagaggagtcagacatggtagttcatgcttgtaatcccagctcccaggaagtagaggcaggagggtagtgagttcttgggctacagagcaagcccttatcacatatacttgtgacatatatttacatgtaatgcatatatttgcataaaagggaatatttaatgattaactaaaaaggattttaacaaatattttttctttgtaattcatgtttagactaaagtagaaatattacttttaaggtagcataaaagaaatgattttattaaaattttaatgagatgatttatgtctccctgacatttccttctttgaaaaaatacataagcaaataaaaacatgtaaacacagagaaatgttaagtttgttgggtcaaactctgtttgcagaactattgtaattataagtcattaatatttttaacatggaagcacctgggttctagtatccacacagaaaagattttttaatctgagtttgttcttattcttgaaattttgttatttttaaattattggtatatgtgttcctgactgtatgtagttctgtttacttgtgatgcatgtgacttcagagttcagaagagggcgccagataccctggacctggagtgataggaaggcatgggctccctcatggggtctagactctttaacactggtcctcagacacagtaacaaatgcttttaactgctgagccatctctccagccccttgtttgttacatactgggctgcatccttagcataggctttgccgagatcattgctggcctgcttgcttactcatgtaaaactcaggggacagcttttaatccttttttttccccaagatgggatagaattcaggtggtcaaagttgtacagcaagcatttttacctgctcagacacgtcatcagccttgctttttgtttgtttgtccgaggtgggggtgggagtgggagggtggggtgagtctctgtggcccagactgttttgaaactcactatgtagtctaggttggccttgaacccacggtaatatcgcctgcctcattcttctaagtgctaatttaatgacttcccactcagcagttgtgggagcattcaatactgtctgctcagtccagctgatcctctcaggtttgcagtttctggcctggcagttgaccatctttgcagaagatttgtagacagggataacaaagattaatgtaaaactaaaatgtcttgttagagaagcttttctggcccccacacaacaaacacagctgaagtctcagctcatgacaatggtgtatagcctccaccctcagatcccagtttttgaagcaagtcagaaggaagtgtctccctccttgtgcagaaaggtacatcacacccttccttatctcctgcctcaaagctctccatctcaggatgaaggacaagaaggataagagcatcccaggaaaatctgcgatgctctcatggggtgtggctttgccatctacaacctttcagcaaatgacctcagaacttctgtcatacttttcttacatcttagtacctgtggacaaatggctcctggggtgggggtgggggtgtccctgcaggtgtcagacaaggaagcaaagcactgaagaggtgagaatgaaaacctagtgcagattgaccttgtcaacctggatcagactatcgtcagcattttaaaacaatgcaattagggaaaaggtttccaggcaacaaccagtccaattccaggtacacaataaggcttaaggagtgtccacagagatgctcctatacacagtacatgtgaccatgagggtaggttctatagctaaaagggctagaatctaatgtggtctttgactgagagcatagaggtcatcaggccttaaaggacttgtgacatttcccctatggatggtctagggagggatgagactgggataattagtcagggaaatttgggtgaggtctggttctatagcagaaggtgggtgaggtctggttctatagcagaaggtgggtgaggtctggctccacagatagcacaatggtcactgagtcattaacaaaatgcactctgagccttctgagtgggaaaacaggtattttatctcatccactaaagagaggcccctgtgtgtttaacattcctggttccctagtgctttgtggatgcaaggacctttgtgcccccaacatcttaacatcttagaacccattttaattttttattatatttagtgtgcgtgcgtgcgtgcgtgcatgcgtgcatgcgtgtgtgtgtgtgtgtgtgtgtgtgtgtgtgtgtgtgtgtgtgtgtacaggtatgcatatggaggtcagaagacaattttcttttcccaccatgtgatgtgggtcctggagattgaacttggtcttggttcaacagatgctaagacatctcccctgtccttgatggtcatgtgaaacaaataattgaaacattatactccaattgcaaataatgaagtaggacaaatgaatgattttgtgtaagcagcagttaaggaagaattagaggatttggaagcagcatataatacaaattggaagccaagtgtggtgatccacacctttaatcctagcatttgggaggcagaggcaggtggctctcagtgagttccaggccagcctggttttgagttccaggccagccaggactgcttagagagactatctcaaataccagatcccctcatgaaaaaaaatatagaatagagttttaagaaaccagtaattgaagtatatcatgagacttagttgctcactgtggacatcagcataactttcctatgtggagagcgttcccctcacactcttggatataggggttctgaagattatttaaggtgggcctaggaagaaggtcatatcaacactggggcagagactggagttgcccaaacccaagacctctgagaacaatagaaacttgacaaggggagaagattctctccaagggctttgaggggagcctgaccatgtgttacagaccccttgatattaaatttctggcttccattaaggtaaaaagtccagggctgatctgttaaggccaaggtgtcctgattgcaggagggaaggaggtagcagttttctgatttccagatacaactttgtttacagagccattgctaaacaaaactccagaccaaagccacttcacaagtttggttaggaacaagaaaacagtgcagcgtgtgtgtgtactcagcaccagggtgtgtaaacagaaacaagggctgcctgtatatttcctctgcagggtggactatttagcaacccttcttccttttggttggaggaaataaaggaggctaagcatttcacctggacaatattacaggagctagtcaaccctagattgtgagctaaatatagataacacacatgtagacgcagagatttgttggccagcttccagaaatgcttgtttctgcacataaatatttctttttgtgtttttgagacaaggtctcagaaagcccatgctggccttgaactcctggtcttcttgtctccatttcccaagtgcagggattacaggtttttctcagcgtgactggtatttatttatttattttaaaacaaccatttatttatttatttatctatctatttttgtttttttgaggcagggtttctctggggccttggatcctgccctggaactcacagagatccacctaattctgtctcctgagtgctggaattaaagacatgtgtcaagccgggccttggtggcacacacctttaatcccagcactcgggaggcagaggcaggcggatctctgtgagtttgagaccagcctggtctccagagcgagtgccaggataggctccaaagctacgaagagaaaccctgtctcaaaaaaccaaaataataataacaataataataataataaagacatgtgccaccactgccctgcacaattttttaaaataattcatttattttatgtgcattggtgttttgccctcatgtatgtctgtctatgtgaaagtgtcagatgttggagttatagacagttcttatctgtcatatgggtgctgggaattgaacccagatcctctgcaagagcagtcagtgcccttaatcattgagtcatctctccagcccacacaattttctttaaaattatgttttatttatcgtgtgtgtgtgtgtgtgtgtgtgtgtgtgtgtgtgtgtgtgtgtgtgtgtatcatgccagtgaacacctatagtcaggtgataaattggttcaacgcctacaccataggggtccaaagactgacagttcatggtgtttggcagcaggcacctttgttgatagctgtctcactggccccagaggctacattttgagagtgagttcctgacaccttttccttcacaagtttctagtggggagagtgtgggcaactggcaggaggtgcagagagaagagttttcttcttcctccaggactcctgggggtggggacagctttctctgcaaaatttgctattaacatgctccgttcagtgtgctggctctccccactttttccaactccaaaaacaattcctgactgtcaactgtgaaacgagtttggtcctactaagaagaatttagagccgattcagtgatggtctggaccctgggcagtttgctcacaactgttctcagtgtcccttctcaggttttaattaaaactggttgagctgcagtggaatacacgtgcaggattatttgttctttgttctagtaagggctagcaccatagcggcggcgtgggacgtggatcccggggaaactcttgcgggttgggtgaaggttagcatttgcgcagcattttctgcagtctgtgctctgagtgtgggtggatgcaagggaagcttaggttggactctccagggaggggagtgacaaacagcccagcccctccacccatcactgcccgcccttttaaaaacgggatctggttatttagccctaggcggactattggaacagcccagactcatctcctctgattcctgggtgcaagtgttggaattacagtcctgcgacactgccactccggtcttctgggtctattctgtgccagggaggtgttggcagggtggctaaggcgacttgtggagagagaacgagcgagctttcttcttccctgtaagattcaaccctgcggctggccagggcaggaaaggaggtgtgtgagggctcacttttgcactgcagtctcctcctcccgaaagcctttcccaggcggccgttttgtacgcttataaaatgattttccgtagagtccgggagacatcaggggcccattctgtgggtgaagatggaaagtctgctcccgaaaaggacctttgctgggagtgcagggcacgggggcgggaggagggaggcggggcagagggcggtggctcacccaggcagcggtgcccccgggactcagtcgtgccagggagttcccagttgggtgatgaggggggtgggacaagggcagagtgcagtaaaagagctccccggcacccgaaagcaagccaccagctacccgcatagcccgtagcccacgcagaaggtgcagggaacctgcagggatcctcactgcccgagggcctgggtgagtcaccgcggggttgtcgcaatcgctacccggaggaaatcaggcccggggtggggcgcgttcctggttgccttcgtgagctctgatctcgccagggtgtcccctagatcgccagctgggtcttctcgtctgctccctctgcggtggtcacaacttggcctgggcctctagtggagagttagccttcggggacaacagggacccaaggggaagagggaaggagattgctgtggttctgagagttctccctccccgcagaggtgaagggagtgaggcaggcggcgctgagtccctggagcccggctccgggtcggacgctgtgttttcggagctgtgcgggactgcctgggacttggatatccctctacggccttgggatctcccggggacctctcccggagggcgtgccgagacatggagggcgcagacctggcggtgaaggtcctatccacctggctgacgctggtggtcggtcttatcgtgctgccctcggccttcggattgtctctaggcatctcggagttctacatgaagatcctggtgaaaacgttggaggtgagtgcggcggaaggatgtgagcccgggctgctctgagaacttagggagctgggtggcgcctgaacatagaactgccagagtcttttgagcaaagggtctgctgtagcgagaaagacagtggctctatttgccgggagagtcgcactgatcccagccaagaacagcagtccacctcacagaaacccttccacctgggttctgtcatcactactattttttacttactagatgaactctaggccgtttgctgcatcagcggatttattacccatgcctcgcaagctgtcacttccctctggagtttttacagccccaggtttcagaggtccttttgtgtctacagaggcatcacgttccacttcatgcccaagataagaaaccaatggcccggtggcagaaaaagaatctgattttattttagtggagtcttgggggatttatcatcatcatcatcatcatcatcatcatcatcatcatctaacttgggacactggaatgcaaaggttcttctttggcctcagcttggtcttgggtttgtttccaaattccccagatagggtgttaggacaggcttcagttgaagtttataagggtctttagtaaaattcaggcctctccttgtagggaggcaagtgctgtgggatgctgagttgaaaggtttgtttgaattaagtgtgacaaacagcagtggtcttaatgaagagaggccctgtaggctgtacagatttgtctagatttggtacctaactctcatcccagtttcccagtatctgatctagcaaggtcatctgactccttcattgtactcatctaccaaatagaagtatcaacacctatttgcatatcattttcatctgttgtctgtttggtttggttttaagacaggctgtcactcttggagccctagctggctttgaaattctccacttaccttaggctcccaagttctggctttacagacaggggacatcacacttagctctccacatagtttttttgtttgtttgtttttggttttggtttttcgagacagggtttctctgtgtagctttggaagccgtcctggcacttgctctggagaccaggctggcctcgaactcacagagatctgcctgcctctgcctcccgagtgctgggattaaaagcatgcgccaccaacgcccgcctccacatagttgtttttaagagtaaaaatacataggacagggagccctcagcaaggtggagccctctgcaaggtgcccgtgtgtgttaggtgctctgtgtgtttgctatgattaaatgaatagtatggttgcttagagtccctgtctttgtttccccagcttctctattaccacctacagctgtgcgttatttttggcttgtgctttttgttctcccaaaggacttggcgctgtcccttcttccttcatagtaaaggagtggctcctagatatatatctttaccccacagctgcctgctaactaaggttttcctctggattcttgttggacttttctttgtggctatttctttaatgaatctttgaagctatattagattctttatcgacagtctgtcccattcttcgacccccccccaagatggcatctcactatgtagctcagactggccttgaactctgcaacctgctgcctcaggccccaagcactaacataagagatgtgtcccaccttgccagccagctttccaggtctttgttctttcttctcatcgtcattacctagtgttgtcacacatgctctgggttttagtttcctccctctgtgagccgttctaccatgttcactccacatgcagcagctgaccccctctctgcagcatgtgtcctgaagtgattgagccagtttcttgggcactggagaactagataagggaaatcacacacacacacacacttgctcctaggtgcttattacagcctctcttgctttaatctttttggacagctaaagatacggcaaggagggagttactgcctcggtgttctcagctggcaaatgactatatttgatgagatgatcgccaatccaggccttttcagcttgtttgacagggccctgagttttctatctagagcagaaagaaactccagagatggtctctctctctctccacgtgtgtatgaatttaaactcaagcaatgcacacatgcctccccccatagcacacataccacacgcatcacaccacaccacaccacatatacacaccatgtacacacacaccatacacatacacccagctccactatacacacacacccacacccacacacacacacacaccatacacaacacacatacaccataccacacacacacacacacacacacacacacacacacacacacactatagcccaagctggcctggaactcaggacttggtatgggccaatctgacatctgaactgacttcaaactgtcttggcctcccaagtccatactttgaattactaatgtgaacttccacatgtagagttagaggcaagtttcttgatgattggggagattttgttttcaaaagaggtttactttctttttatttttttattaaaaaaaggcccccatttttttttggagacagcatctcatgtagcccaggctggcccttctaacttgcctgtagctgagaatggccttgcacgtctgaactcctgtctctaccccaagatctaggattccaagtgcacaccactacttccagttcattcaatgctgggagtggaaccaggtctttatgctagtcaagcttcctacccactaagctacatcttcagaatttttatttttatttttatttttattttatttatttattttggtttttcgagacaggatttctctgtgtagctttggagcctatcctggcactcgctctggagaccaggctggcctcgaactcacagagatccgcctgcctctgcctcccgagtgctgggattaaaggggtgtgccaccacctggagaattgttattattggggctggagaggtggctcagcagctaaaggtactgactcttccagaggacctgggttctagttccagcacccacatgacctgtaattccagctgcaagtggttccaatgctctcttctggcctccttaggcactgtaactatgtggtgaacaagcatacatgtaggcaaagcaactaaacacataaaataaatctaaaaaattaaaaagaaagaattattattattattttgagacaggatctaagaattattattttgattgttgcatagtctctttaatacatgggatgtgtatatgtgtacttgtatccatatgtatgtatattcatgaaagtagaaaagtctaattggggaagaagttagtgggagagggtgaaggggagacagggcaggtatgtgatggttatggtcaaagtagataatatatctgaatttatgaaacccatcactatgcacaatgaatatatgctgatagatttttaagtaagttattaacaggtagaaacagaacagatcttttggtctactaaaacatatctgctagaccctataaacagcattgtgaagttagaaatattaacatttccttttgtctgacaattgccatgcccataatctcaacacccaaaaggctgaggcaaggctgttgtaagtttgaggccaggctgagctgcagatcaggagcctggtgaaatggcacttgtcaccaagtctgatgacctgtatttgatccctggaacccatatggcagggtagagaagtgaccatggcaagttaacccctcgacctccatacatattgaattgtacatgccctcagatattctagtagccattacattctctgtgaactgtcatttgatgtctcctttccctccctccttctctcctgactttctgtgttaaataggacaagatcttgcagtgttgcattaaggtagtgataggtagcattgagtattcttgctttgttcttttcctttgaagaaattacttctaatttgaaaaattgctacttatttattgtattattattattctttataacatatcattatgtactatatataattatatattatcatttacatacttacaaatatatatttatattaaattattatttttatatagttactattatatacacacatatatatatttgtgtatgtgcttgcacaataattattttttgaacacctactgcatgctgctttctctattgctaggtgtccctagatatgaatacatgtctctggtatggcaagctgtttgaagacatcgactatttgggatagaatctgttcagtgagtctttagaccagtgatttccaagggacatataagaaccggctgggtaatatgtatgctgaagattagttaatattaggaggaattgtttgggggtatgaactgagaagtaaaacttcagactgaggaggtgccatcaggagaaatcccccagatggcagactgtattgtcagagtctcgggggtgtgtgtgtgtgtgtgtgtgtgtgtgtgtgtgtgtgtgtgtgtgtgtgtgtgtgtagattagacagcccgatgctctaaccctccaagttaattgcaaggctagtgattaaggggagagtagggagggattgcttttccacggtctgcgtgtatgagtagaaggaaaccaggaacaagaagagattgtacaactactgacaggaagaaagtatgagggctatggatacagctcacagcatgcctatcatgggttcttttgccaactctgaaagaataggtcttgttagattcaaattcttttttggataatgcaggcacagcaaggagtaacctccctcttccacttttgagggataagatggagggaaggacaagttctcccatgttcctggctctgtggtctctggtgggtcactttatcacagcctcagtttctgcatgtacaggttcaatatcctactggattattctgaaggttaaagtgggagaggcatttgacacacagttggtgctgagttttagtggcatttagattgggacattatgacactgtattgtcttctcatgagactaagatttaacttgttcactttgatggtgaacacccgctcagctgattcctcttgccttctctcatctcttcactctctcttccatccatcaaagattttccactctttgaaagaggcatgcccatagttcccaggaggctattaccaagtttgtgtaagagatgctctctctgacgttggaaatacaatctgtgtgctagaaggcccaagctgtttatcacgagcgatggcaataaagaaaagctggtttttcatttatcttatcccacaggggcctgccattattcttattgatttagggcaggagttcagtagcatgtagctgtcaggggtagaatcaggttttcagtttgaatctggagccaggattttcattctacggatttgatagagtctgccgagaagctctcatttggctacagaggactgccagctgttatttctgtaaaccttacaatttgaatttttagatgattttatttgttttccttgtctctttcctcgtcttcagccaattcttgactctttacagcataaattttagaagtttcagttgtctagagtgagaatctcatatatttgcaagcttttggtttgttttaaaatcagacttgaaggttgggaatgtgtcttggttggtagagtgctctcctggtgtgcataaagccccgggttcgattcctagcaccacataaactgggcaatgcctacctgtcaggacttgggaggtagaggtaggaatatgtatacattcactaatacaatgtatcactaataaagaagaggtcatgggtttgagagggtgagggagtcgtgggggaaatggaaggttgggaagggtgggtgaaaatgatgtaaatatggtatccatgtatgaaactcaaaaacaaaagaaatggaaggttctcctagtctccatagcctggaagtcatgagatctttttctttaaatcttgaaatgagccgggcgttggtggcacatgcctttaatcccagcactcgggaggcagaggcaggtggatctctgtgagttcaaggccagcctggtctccagagtgagtgccacgataggctccaaaactacacagagaaaccctgttttaaaaaccaaaaaaccaaaaaaaaaaagttacctgtttcgagatcatcttgggggactgctcattttgtcacctaaaccaagtgtgaggtatgtgaggaaggagcaattcatcagaatcgctcattttgtatcctatcaactggtgggcaccaggtaggtgctcctctttcgtgctcccccacatgtcctgcatctccatactggggttgagcccaaggacttgcacacatcaggcaagtgctcctctctaccatcgtgctatcatctccctagttctcattctactttgtattttgagaaagggactcagtaagttgtgcaggctagcatttaaatcactagaattaggttagagttagagtaggcaggccttgaatttatgatcctcctgcatcagcctcccaagtagttgggcttacagatctgtgtcagaccctgcctggctcgttaatctttactgtcacctttggtattgacccttctcagagagatgatgaaacagatgccccaagagcttaaagtctcagctgggaaataggaagacaaattctccctgacaccaggcaggctgtaatacctctttacttccagtgtgtgaataagcatgtactgggaagcagttgtctacacagactcccaagcagttgtctacacagactcccaagcagttgttgtctacacagactcctgttgactttgaagagctgcctctccaaccttgaaatttgcttgtcttgaaccatctttgcagacccttggtgctctcaaatggtgaaacctctgccttcctctttgaggaatgtgatttgctacttgagaatgtcactgtatatgacaaaatatcacaggccaggcaggctagacagcagagatttaccttctcaggtttctgaagactgtaagtctcaggtcagggaggccatgggactggctttatttctcactgttttcacacacatccccaatatttctttcttttctttcttattgtgtgcatacaatgtgtgtgcagacagctgcacacacatcctcatgtgtgaatgtgggtgcctttgtgacatgcattgtagaggtcagaggacaattttgggggtcagtccttatatctttgagtcagtggtttttatgatatatacatgaagttagtgaacttctgtgggttctcctgtttctgcctcccatctgtcttataggagatctgggattacagatgcttgccaatacatctggcttttttttnnnnnnnnnnnnnnnnnnnnnnnnnnnnnnnnnnnnnnnnnnnnnnnnnnnnnnnnnnnnnnnnnnnnnnnnnnnnnnnnnnnnnnnnnnnnnnnnnnnnaccacattttaatgaacttaggatcccatgccaagtttagatgtcacagatgctccataacttggagtttattccaatttcacaggataaaaggacagtcagtctgaattaaatacagcaaatctcataggtgctgaccttactctaaattaagacatattttctcccactctttcttttgagggtcccatgtagcccaggctggcctcaaactctagtcaaggatgatcttgaccttctttctgcctctaccatcctgagtgcatgggattacaagtgtgtaccacttcccttagtttgtctgggcttcatgtatgccaggcaagcaatctaccaacagatatccacagctcccaatagcatacagcttctatagttcctcatgtgcaacccttcagataataaatttcttcttacaaagaacctgcccacttgaccaattttaatactaaatcagagtgccaagatttttctacattttttattatattttttttaaaaaaaaatgtagctggaaatacaggtaagtcattcagaatgagtgagagtttaaacttctatagaaacttggtggcagcctctggggccactgcccaggtccattctaagccatctgtgattctggaatgtggaggacacagttgtacccaacaaggcaaagagggcaagagaccccacagaccctccataccacttgctactgtcccctgtgtatgcagaactggcccaacaaccctcaggcccaagccagaagctatacctaaatggtaaatacctccaatagctagggagaaaataggaagggaggaaggataacgcttgcattgtgttctggtaggctctctgaacacaggggaaaagggtgtgcactgtacatgacaggacacccctgaacttcttgtgggccttcatacatgggtaacaccagtgagagaagccaaaattctgctccttagttacagctctcaggagccccctaagttatagatagcaaggctagatcagacactccatcagagaggctacaggactttctgaaaacactggagaacttagccttttgatttaatctagtgatttatttcttccttattgccactactcctataaaatttgacttcctatgaacatggtgtctgaaatgattattggaattcttataccaactaaaactgtttctttaggcatataaataaacaaggactggctttaactcacatctaccaaaagcaacaggtgtcatatgttgcatgggaaaaagaagattgcactcaaataaccctaggaaagcattacatataataaaaaatgcctctccctccctccctcagcccccctctcattttttctaattttttaaaaagggcttagtaacagagttcaagctgaccttggatcagctatgcagcccaggccaacatcaaacgttcaatcctacaacctcaggctccagagttctgggattacagcatataccaccatgcccagataacatgttctttaccatgggacttttctagacctttgtcaccatacaatagtactctttcagaggaaggggcagtatataacacctccacacattttccctggagaatctgattttgttattactggggttttggggtgctggagactgaatttagagcttcacatatatgaagtatattcttttccagtgagacacaatcctttcccaaacaagagttgtggtgtttttttttcctaacttcattatttatctgaattatttttccactatgtgtctgtatatggtgtgtgcactgagcttaactgacgatcactcctcttcatattactgactgacacttgcttcagggctcatacatcatggttgagtttatgactacagtctgttttcatcctcattgataacttgggagtggactaacaccagggtactctagcaggtctgaagggaatagggatatattttgctaagtttcttagctaccttttaaattcggtagtggtgagccagctctacccagatcaatataatctagtcactacgtgctatgtgagcacaaacaacaccggctatacagatgaactgcaaatgtggtgaccagaggtatcatatctttctagagctggagttacaggtggttgtgagccacccaacatgggtgctgctggaactgcatttgggtcatctacttgctcttaaccactaaggcatctctccagcctaaagtttcatttcttgtgcagtattctcaattagctttcagcagtaaaatgtagtctaaggaacagactttgagaccctttggttagaagttagaatgaaaaagccctgataaggactgaagagatgactcagtggttaagagcactggctgctcttccagaggttctgagttcaattcccggcacccatatggtggctcccaaccatctgtaatgagatccggtaccctcttctggcctgcaggcagacatacaggcagaatactgtatacataatatataaaaatcagaagaagaagaagaagaagaagaagaagaagaagaagaagaagaagaagaagaagaagaagaagaagaagaagaagcaacagccctgataaagcctcaccttctaagttctaactcccaggtattcagattagtttcactatgatttgtaaagtgtggacctcaaaggttcccgtgtaaggggactggttctcagtgtggcagtgctcaagtgctgtgaactttatgaggtgaagcctcaaatgcatccctgggtcatcagggtgctaccctggaaagaggttaaggttctgcttctgcagccagtgacagttcttgtagctgtgacttgttacagcttgagacagacccctgagtcactgtctgcttctagctcacaataggagaggcttcctcctcccacctcccacctcccacctgggctccaccatctggcaggagatcctcccaagctccacattgcctttgcacctgagtagagtagcccatcagtgttttcttatagtgatcaaaaaactgacaaacagccctcatcccaccctcctgaaaaaaattatccagtctcaaaattaagatgtaaatgatcaaagtaaaacaaagaatttactgataccatcaaaacatacacacaagcaaagtcgcaggacaagtcaaaaaactacgatgaaaaataattaccatgctgggcagtggtggcatacacctttaatcccagcccttggggggcagaggcaggcagatatctgagtttgaagccagcctggtctacagagagagttcagacatccagggctacacagataaaccccaaaccaaaacagaaaaaataattgccaatgttttcaagttaaaattttcaatgtaaagattagaaaactcaaacaacaataataaatgtacaaaacatagaaattcgattgtgtaatactaaataattaaaatggccatataatctatagcaactggaaaatataacacagacaacaataacttactccccaaaaagcaaacattcacacaactaaatgaatgagtagtgagtacactgtactttaggggactgaaccacactatgtccttgattatatgtaaatgagctgacccctcatgttagcttgtaggggtgctgaaacataggacacatcacttgcctgtatcttttttaatccctgactacatctttaaagccacaagtaccctcttcaaatgcaggccttagaaataaaataatacatggaagaagagctaactctggagctaactcactgaggagctaactcacactgcccagccttcctgacaacaatggtatcaaaactcgggcatccactattctacattacagacaaaactatgaataaccttaggcctagagacgacactggtctctgcatgtaccaaccagaacaagtggttctaaacccattcagcttgtgtattgaacccatcacaatagaaggcaagacttacccacagaagctgagtttttaagaactgactcgtttggggctcctttttcaattcgcaatgtggcccactgttcaaaaaaaaaaaagaagaagcaattcgttgaaactcttccacagacacatgtaaacactgaaacatacctagacaaagtaacattaaaaactaagtctgaggccgggcgttggtgatgcacccctttattcccagaactcagggggcagaagcgggcagatctctatgaatttgaggccagcgtggtctccagagcaagtgccaggataggctccaaagctacacagagaaaccctctctccaaaaaccaaaaaaaaaaaaaaaaaaaaaaaaaaaaaaaaaaaaaaaaaaaaaaaaaaaaaaannnnnnnnnnnnnnnnnnnnnnnnnnnnnnnnnnnnnnnnnnnnnnnnnnnnnnnnnnnnnnnnnnnnnnnnnnnnnnnnnnnnnnnnnnnnnnnnnnnntgggctacatgggaccctcaaaagaaagagtgggagaaaatatgtcttaatttagagtaaggtcagcacctatgagatttgctgtatttaattcagactgactgtccttttatcctgtgaaattggaataaactccaagttatggagcatctgtgacatctaaacttggcatgggatcctaagttcattaaaatgtggtgtctgttgggagatagtcatccaataggccactgtgacagaggctgaaatgggtgagcaagcaaaagacattgtaggaggagtactgtgttctgtgttcatttgtgtccgtattaacccatgtaaatcatgactgcatgctgtagacctctgccccacttctgactctatgtttaggaagtctgcacttacggggtgtgtgccctgttgatccatccagcatttggagtcattagggaaatggtgtcacaatcctagacagacagtatagggtgatgaaacacagtaagcactagtgtgcttggctggtgcaatcttccctctgtggagcatcatgtctctgtaccagagccaacagaagcataagccagtgttgtggagccatccagctcaggcaagggtcacaggcaggcctggggccccagcagtgtgacttttgacatgcctctgaattacacagtcctgataatacttttggaggaccttcgagacacagattggctagggaggggtgataattacttaccttctgcatgctcacacagattcgctcacacagatttgctcacacagattttgcccacacagatttgcttatacagatcctgctcacacaggttctgctcacacagatttgttcacacagatattttctgctgcttttacttaatgaaacacgtattttatagccaaccaggtctctctaccagttatgtgccttttgtattatatttcttctgtgtttttatatatatcaagagaacctaggaaaacattctctttatggagaagttattctttttctgtcttcagccacattcattctcctacactggctgtagaagatggggtcatgagtaggatcttctcttgcctgcatcttcttgagattagagccctctcattgttaatatataggtggaggttaaccccttcaaatgttacactgccgtttagttggtgggaatgtaattccttccatactcttatccttccttcacatgtactagctacagccacatgaggaggaagggaaagacaaggaaagaatgctaatggctcctgtgttgcttttatcactctggccacagtattctgggatgtggactgcgatcttaatgacgttcgtcttaacttagtatacatatactatactatgcaagactcatagaacttagaaaaattattattatttttaacatttttttattgatttacggtttacattccagtcccaatttccctttactcatactatttttaatatacagacagggtctgttcatgtagccctggatgacttggaactctctatgtagatcaggctggcctcagaaatccacttgtctctgccttctgagtgctggggttaaaaatgtgtgctactttgcctggacacccagaagacggctggccacactctttgggtccttgattgagtccagtacaacattaggcttgaattggtcattttggatgagtgtgatttcttgtgaaattttagtggcagcaggtgaattgttgtatatgtgtattatgatgctatgactcaagagtagttaccaactcagagtcagctggtaggaaagtcagcaccgatctgagaatgagacatacagggcaactactgtacacagagctgaggcacaatcatttggccttgctcctgaatgtgtttccggtcttacttcagactgtttgctgtgaggaatgaatttgtactccacaacttccattgtcatgacacagggagatttggggttacttagcctactgttaatttagctcatggctgtagttctcttctgcttcgtacctcgggcccacagcctctttgtccatctaagcaagaaccaagtattagggtgaaactaactcggtacagagcagtttgttcagacagaattcagcttgcctaatatttccttctagttttccttctgcaattcttcctatgaggtatactgctagcctgtatatactggttatgacaataatattctgataaatttacaagaactgtggaataatattttattaacaaaaatgtgagaaatttcatttgcttataaacattccttttattttgggaaagttattaagttgtctttggtagtctgttctttttttcccttgtggtcctaatgatcaaattcaggtctcatgtatgttagtcaggcgctgtacccttgtgttatacctttagtctgatagtctgtttaaattgtctaagttggtgtaagtactattatttattgtcttggtttaaactcgatgaatatatacccgtacttactaccctagagcatggagtataacacgtttaatggagtactcttaacctctgaactctctccagtccctgttcggttagttttcaaggcagggtgtagttgtttgaaacagagcagcccccataggctcatagttttaaatacttgatccaaagttggtggaactgttgagtaaggattaggatgtgtggccttgttggaggaggaggggggtgtgtcacaggggcaggctttgaagtttcaaaagcccttgccattccagtgtctttctccctgcctcatgattgtgtctcaagatgtgggctctcagctactgctccagagccttcctgttgccttactcctgtccaggatggtcatggaccctaaccctctgtgagccccaagtaaactcttcctctctaagttgccttggtcaccatgtcttattacagcaatacaacagtaagtaagtaagacacgggtttagccgggtgttggtggcacaagcctttaatcccagcacttgggaggcagaggcaggcagatctctgtgagttcgaggccagcctggtctacagagtgagtgccaggataggctccaaagctacacagagaaaccctgtctcgaaaaaccaaaaaaaaaaaaaaaaaaaaagacatgggtttaactagtctagtctggtctggagcacagatgtagttcaaacttgcctcacattcatcatcctgtttacctcagcctccaagtgctgggattccaggtgggatcaactgtgcttggctcatcataatttcttattcccccccccacctgagacagggtttctctgtgtagccctggctgtcctagaactccctctgctgaccaagctggccttgaactcagagatccacctgcctctgcctcccgagtgctgggattaaaggtgtgtaccactaccgcccagctataatttcttatttttgtaaaaatgtttttattagcatatacagttatatgtaacaacagatttcattatgacatttccatacaagtattttagtcccattcacaagttcagcctccgccctctcatcctccttctcccatcccccacctccatctgcttctcaaccttcttacttctgctaataccctcccccttcccagctagcaccacttctgcactcttgtgtgtgtgtgattcagtgggttttactacggtcacttatggagtttttctcgccctttctttccaaccattaactgcatatatatccttagggaggggtagggcttggcgagccccttccctttccttgacaggtgttgacaggcccactctcggggagatggtgtagaggtataaccatagctgctgtgagttcagagccagctctccacgcttctccctgccttcctccagctcatatgtcctttctgttccttcttccccagtgtgtcctaagcccgggagggaggagataataaagacgtcctgtttatagctgtcctttattctctgtaccttgaccagttatgaatgagtcttttctaccactgctgaccactgcagagagaagcttctctcatcaaagctgatagggtgctaatgcgtgctaaaggtctagctatttagaaagcaacttgactggtacatcgtgtccactcctctcatctcgatggcttaatatccactagggcacagcaatatttgtattactgtcattgaaaacattcttgcaattgatgtatgcgacctgaaattcagtcgtggttcagcaaaacggttactaactttttgttgttttactacatatttcctgcctggcccggaactcattgagtggatcaggctggccttgaactcagcgattcacgtgcctctgttatttttattttaattgacagttatggaagtagttttttctagaggcaggagtaccacttttaagtggccctgaaagaagttactaaattgttacctatttttgtctatatgttttggaagggttttgttttgctgtttgagactcaggcagacagttgaggttgaccttgaacttccaaccccactgcctttacctaaggatacaactgtgtgacactatacacagctctgtgtattatcttaacactgacctgtagctgacaggtgtttgattctctcttttttttttttttcttgctttttcgaaagggtttctctgttgctttggaggctgtcctggaacttactctgtagaccaggctggcctcgaactcacagagatccacctgcctctgcctcccgataaaaggtgttcaccaccaacagccggcttgattctttgtttgcttgtttgaaaaccatcagtttcctgtctccatttaagtgcaataaaagtcttaatcaggcactttagagaacaggttggtaatccctatgtcttagtttgggtctctgttgctgtgatagttcaccacgaatagaaacaatctggggaggaaggtgtttttttatgttatactcccatgcccagtccatcactgaaggaacacagggcaggtagtcaagtaggaacctggaggtaggaactgaaacagagactccatggagttacaatggttactgcttgcttagttttattttttatttttataaaacccaggaccacttgcccagagatggtaccactcatagtgggctgggcccttccacatcaaccattaattaagaaaatgcctcgtaggcttgtctatagaccagtatgacggaggcatcttctcagttgaggttctgccttcccggatgactctatcttgtgtcacctagcacaacctgcttactgagtgaagctgaaaattgctctttagctcacaatcgatgttttgtaaaatgtcgagcctatccaaactccaagtgtaggtgtatcaggcggcctgacaaaatgcaaacacggaaatgacctatttcacagcaggtaggctgtttatttacaggctcttgctttagtactggagtgtaatacctggacttatggagaggccaaagtagataaatctcaatgttaaaagaaaaaaaatatgtactgtgatcacatttctttatgtggggatgagagtgtattgctcagtggtagaatgcttagcatgtgagaacccttgagggttgggtttatttatttattttttccaggacaaggtttctctgtacaaccctggttatcttggaactcactatgtagactagggctgcctctgcctagttgagtgctgggattaaaggcatagcaaccatgcccagcatgagaacccttgagtttaaatccaagtaacacacacacacacacacacacacacacacacacacacacacacacactaaaatttaccattgaatatggatactacatatttatgtaaatatttacagataaatatatgtatggaaatgataaatattgcaagagagcagtcttctaggaaggaggtggcaaggtagggatttaactttagctttttctgtaaaggcatttgaagttgggcctggggaggtagctcagtttttagagtgcttgcctagcatgcacaaagccccgggttcaatctccaacaactcacagactgggtgtggtagtgcatgcctttatggttgagacaccagctcctggccctcagctttgaatcatgcctgacaaatggagttgggtagtcttacaggaaaggaaactaggtacttgtcccaggggtccaacttgatgcttacctccttcaaaacacaccttccttcagcttgattagcatctagaatttaaacctgaggaacagaggcattgttgacagaaaggtattacttggggagtggggcttgtggacttccacactgttttagactggtgacaactgggtgattctttgttgtggggagcagtttcctatttgtaagatgcttagcagcattcctgctggataacagtggggtacacccacctgacaaccaagaatgtgtgctgatcctcccatgtctgccctgattgcagctaccacagtagtgcattcagctgtcagcatgtaccactatcaacagggttgacttctgtgtccagcagaactccgtttccagttttcagtggctgctttggggaagagtggggtgacaggacaacatgggtggaagagggttggctacgtgtgagtatcgtgttaacaaagaacactggcacgcaaggaagtgtgctccttaaggaaaggtggaggcaccttaggctgtcccaactgtaactcttaacccaatgagaatgtgttgcttgtgtttgggtctcatccttattaggttttgaatgtctgtgtgtctgctggcctcactgactgactgactgactgaaatctttgccctcagcactatgcacattatttatgtgagggaagtcatattagccctcactttgctgatgaggaaactgtgagaggaagttcaagtaattcatccagatcaccggtcaaggcagtctggaaaggaatcccaatttgtccagtgcagaagccccccctcccactaccacccttgtctcctcccccaccccaagtactctagaatcctgccattcttcttgttcctctggtcagcatctgattctcacccagttggctgaggcgactcttctacaaataacacctcctctgctgctggggctgtgcgtagcaagaaatgatcatttgtctcccccactcctttcctgatgtttagtgtatagttttggggatccctgacaaatgtggcatcttttggtacaccagtggaatggctagtggctggagttcctgcttagcttcaggatggagatgatgacccataatccaaccccaggggatagggactatattggttataccacaaccagtgcaacttaacagagaatagtttatttgggttcactgtttcagagggctaagagtccactggggcaaggagcatggcagcaaatggcaggcatgtgggaagctgagagatcagaccttgaacagcaagcatgaagcagagtgaactgggctgtgggacgacaatttaaactctctgtccagccccggtgacatacatactttctctaacaaggtgcccatgcttgagaccttctgaatcttgctctatgtttcacctggatgttcatgcctgtcctttaaaatagtcctctggtaataagcagtggcaagtggagtgttatcttgagttctggcaatcatttttacagactgctgaacctgagaagggattgattttgggaatccctaccatagcctcttggttagaagtaccagaggcttcagaattgatgcagttttgatgcagaattgattgggagacagaggcagcttggtctacatagacttccaggacagccagggctacatataaagatcctgtttcaaaaggaatatttaacgttgggctgggggtgatcatgcacatctttaatcccagcactctcaggtgggtctctgagtttgaggctagtttggtcaacatggtgaattccaggttagccagaagtcatagagagaccctgtctctcagggtttttttttttttttcatgttataattgaggacactacagatgtgcaccacaccataaagtctaacatgtttccatcttgtggagtttcttgtttgagttaaccatgtataaatcaacacagttagtgcggactatcagccagaataagaataaacagtgttttaagtgagttgctaaattggaatcttgcctattatttcaaatgctagttggtttctctgtggtgttgactgacaactggttatagtgtctacaaaccacccctgacttttgtgcttcaaaacacagggataattctgtaagaaatactcatttgggttaaaaagcttcacattttatggttgtcattgattgttttataaacatcctccatagagcatacaatgacttaaaaaggaagtagagtttcctcagttgtcttcaataagaaaagtaagtttctaatacttctagtgtggcaagctggtgagttccaggaatctttactgggatacagtcatatactctccagctttgggatctcaactgagatccccatgatcgccatctcccagctctctgagggacattctcaaggactccaaatgtcccctctccaaataccctcacattggggattagatttcagtgtgtggattttatggatatacaaccatttattctatagcagtaattttatttggtcttgaaaaccaagggacacaagcagaaaatacaattataaagaggtgtgtgtgtgtgtgtgtgtgtgtgtgtgtgtgtgtgtgtgtgtgtttgagtgtatttggttggttattattaacaaatgtacaaaccatgtaaaaacaggatggtagaaggtacatttatgggttaagcatttgagttttttcatcccaagtatcagagtcaacaaacccattcaccatccatcaccctggagatacaactggttgataagatctgttactacgatgtagcctcagcattcatgtcacaggatggcagccagatgtcacagttagttaatttggagcaggcttttctaatgaagcccttgttctagcttgtagataatatcactaacctgctgagtaacacatatgtggtttcattgcttgaggttatgttgatcattttgacataattgaaagtacaatgaagttgattgaatgctcttaaattaatcatgtttttaaacaataaaggaaacaaaatttaaagtcatcctgggggctgggagtgcagctaagtggtatagcatgtgcttaacccaaacaaagccttgggttccatacttactataaaaagttaaaataaactgggtggtggtagtgcatgcctttaatcccagaactggggaggaagaggcaggtggatctctgagttccaggccagcctggtctgcagagtgagttccaggatagccaggactatttcacagagaaaccctttccaaaaacaaaacaaaacaaaacaaacaaacaaacaaacaaaaaaccaaaacctaacttggtggtttttgataagtgatctaaccattggattggtgacttcattttacctaattaacccaaggatgatgatacagggcaatctggagtcctctctctgggttcttagttttattaataaaataatttaagaatggatttaaatgggaggaggggggacacctttttagagtttaaaagaaaaacaccacagggtagacaagctgtaagtcacagcagctgcctggaggaggagaatggatagaaaaaggaaaaatgtagctggttctttaagctggcatggatgtcagacaagcagccacatggcagagagggtagttttacaaaaaagagcaagaaagctaaagtatccgggaaaacatacttgggttctgctcagcatctgaaagaaatagatggaaaaaagaaaaggaaaaattgtatattttcaagtcaggaatgagaagcatattgtggctgcttggtctgtagggggtggggtttcagggaagggaaagatagtatctcattccagggcaggcattctgttctcttgaccagaggactcctggacccaagagtctttactgatactcttgacaatgatgcttggttacatgataaaggcttgctacaaaatgtcagaggaagaaaagtagacagctactggcgagaaatgaggagaactaggacctagaaagatgtcaaggtgtctcccacagccggaaggctcaagcatgcaatgacagacaagttgactcatttctcactgaggactatggcagccatgtgtctacacatatctagtcttgggctgtattgcagtgatgttgggcgtgtcctcacataactcctagcttccatgctgggtggtgtttaccagcatctaagggtcaataagagccaggcaatgtgtccttgaattacatgaatgtatacatataactaatttgaggaagacagtccctaagagcttcatgggataaaatcatttcggatggataaattgatgttgaacctgccttggagagatgatttttaaactagagcaatgaagtaaaagcttcattgttcatgagggtgtgttagtttacagaaggaagaggcaaacagaaatgaagttgtataagtgggcataagtaggccctcacctcacagcatggcagaaggttcagagttgtggatggcttttcctgcctgtagcccagtacttggatctcactagctagtcagcctctcaagaatggggtgcttctggatcagagaccaataaagaaaaacccaacattcttctctggcttctgcaggcctgagaaagggttcagaacctgcatacttgtgttcatgcacacacacacacacaccactcatgcacacatacacacaccaaaacagaaattagtaagatttaaaatggctgtttatcaaatccaggggaagatgagggatggctcactaaaattgtttaattgttagagaaagtaagttacttttcttcatattcctaaaaggtggaacaaatgtgtttgttcaagtcaaaattacataaattgtatgtaaggaaaatctccttattagttaaaaaggaccagaaaaccagaccaggtttgtagattagacagctgaggattgtgaactttgttaataatgaaactcttctcattttaaaaaaataattaatcactgggtagtggtggcccacacttttaatcccagcactagggaggtagaggcaggaggatctctgtaagttcgaagccagcctggtctacagagtgagtttcaggatagtcaggactgttacacagagaaacccagtgggggtggggtggggtgggagggagtgacacagggacgggatgggcaattagggctggagagctggcttagttcttaagcatgcatattattcttgaagaggattcttccagcttcaggagaatctgatgacttggcccccacatgcacttgaactcccatgcacctattacctatatcacaattattttaaaagatttattttgttttgaaatgggcagatctatgtgagttaagggccagcctagtctatatagagacctatctcaacacacacacacacacacacacacacacacacacacacacacacacacaccacataatttgcaagacataaataacaacatgctccccacaaaatgtggtatggctttagttaacgttggcacatatcagtgtttcatttatgtcccttcctctttctgcctctccagtgaggtcagtaccggcactgagacaggagtgagtaacttcctcatttctgctgactcatgtcatatcagcatgtgtacttgagttcgtgtatctaaataggtgtgtactcaatctcgattacactgactccgccaacaggatctctcagcatcagcgtgtgatgctggcaggctttcagatcatctgatgcttatcttcccagctagctttctatgcagggaacacgggtccattacctcctttagtcaagctttgtttaagttttgaaactttgaaatgacatctcaagattgatatgccctttttaaaagacaggctctcactctgtagtgatggctgaatggttaagagttaaggtttaagggattaaggcacatacctttaatccagcactcagaaggcagaggcaggtggatctctgtgagttcaaggccagcctggtctacagagtgagtgccaggataggctccaaagcctatccaaagcctcctttttttcctgtcttggaaaaaaaataaaagagttaaggtttgggctgcatgggaagctgggctgcttctttccagcctatgtccagtgtatggtcctaggatgatttctctggtcccttatgtaagtggagtcatgccgaacgttctctgtgtccttttcccttcagcagactgtctggaggcttccttctgttgtatgaagtggatttttaaaaaccatgtttgtgatatattcctttacatagacactgagggtttgttcatttgtgtttatattgattgacatttggtttatttaattttgttgattttgagacaggtttttttttttttttcttccccctgtgaaacactcgtggctatcctggaacttactctgtagaccaagctggccatcaactaacagagatccacctgcctctgtctctccattgctgggattaaaggtgttagcatcaccaccctacctatttttagcttttaaccattaggaacagggctgctgagaacattgtacagataatctgaatcttttggctataggataagcaacacactgttgagctttattagaaaatgccaacggtatcctaaaatgtttgcacatactcactagtaacatagaccgatcactcatgaggggactcagtactgtggggtgctcgcccccctctctggatcccaggttaacatagactacacccaaattcccatttccaagctcaaacccaatgcaaagagatctgattattaagcaaggcaaagagacagagtgactgcctctgaatccagcagaaacagcagcaaatagccttgcaagtgttgatgtaaagagggaagaggggagttctgtaaggatgagctaggaggcggtggcaagttctgactggctgttttaattagtttagtcaaaataattttgattcctggaccttgatgttttggtggctgaaccttggtaatcagtctcaggaacggtcagtggccaaataaggggatagactttggtaaatagctttaggaatgtaatctaagggctattaacaaagggagaaggataaaggcagaatctgtcagcacctcggtgtttgccacgctaaggcctgtgttttgccatggtccagcctcctagagcccttcaatttacataaagcatttatcaagaatttgatacatttgtttcatctgtctgccccctgggggggttcttttgtggaagtatttgtgttttggtttgggacaggacctcagtcttcctccctcagcctccagagtgctgagattatagctgtgaaccacaggccatacttggtttgttgaactctccttaaaactcaaatgaactgtaggttaagcatagcaatgacgtagaaagtttagaatttacagataggtaatagcatcttctgggctggagagatgactcagcatttcagatgtaggacagaatctgaaattacagttcagctgcttttccagagaacagctcacaacagtctgtgacttgagttttaagggattggacatcttttgccaccacaggtacctacactcacatggtctagcatgcacaaacactggggtcagtttccagcattgcttaagctgggtgttgtggttcatgtccgtgatctcagatatggagagctggagttcacaacattaccctcagctacacagtgacttcgtccaaggccagcctgggatgtgagctgctctctcaagcaaagtcaaacaacaataatcataatactaattccattattgcattcaactaaatttataacaataagatatgtttttaaaagtatttgggaaaaaagtgaagtgatcaccagaaacccctagagctactatgaagtaagcatagccaggttgcctaatgtaagccctgaagctgtgacttgactgatggcccaggggatgctttggactagaggaaccagggcctagccttgcagagttaccactgaatgtgaaaaggataggagaaggtggactgaagagcttttatttgccagtgtagttggttcagtgattcacatatcaatgtccatagcaattaacaacagggagaatgggatgggaccaatgttcagatcttgacagctaatcacagaacattggcctatccgctcccttggcgttaagtatccctgttcttaaatcccaacaggatctctttagctcacgtcccagctttaaccacagctttccattgtaattgttctctccctgtctgtttaaaatcaggcccatcatatctatggctcagaaggaaactgggttttcataggaagggaccttcactcaggccacaaactagagtatttccctcacaccaggaaaagccatcactaaactcctccctgccccactttcttagtaactggggatgaaataagagaacagcatgtgtaggaaggagtctgtcttagaatttctattgctgtgaagagacaacataactgtggcaactcttataaatgaaaacatttaattgaggttgcttgcttacagtccaaaagttcagtccattatggtggtgagcatgttcacttcttgattagaaggcaacaggaagtggaccgttctttgtactaagcgaagcttgatcaaaagagacattgaagcccatccccacagtgacatacttcttccaacaaggccacacctcctaataatgtcactgtctttgggattatgagggccaattacattcaaactaccacagagtctgaaattacaaatgcctattttatattttccaaagggaattgaattatctttcatccaaagcagtggttctcaaccttctaatgatgcaagccttttaacacagttcctcatatttggtgattcctcaaccataaagctgtttttgttgctacttcataactgtaattttgctactgttatgaatggtaatgtaaatatctgttttctgatggtcttaggtgacccccattaaagcgtcattcaggggttgagacccacaaattgagaaaacactggtctagatcaagaaatggaactttaccaattccaaatgttctcagtcccacccgtccctggagagtatatacttgtcaaatccataccagatttattttagatatttccataaacaatgttaggaaaggtgattgcctattattattattattattattattattattattattattactattattttattattgtttttttttgagatagggtttctctgtgcaacagcaatggctttcctggaacttgctttgtagacctcacagagatccgagtgcctctgcctcctgaatgctgtgattaaaggtgtgcaacaccaccacctggctgattgcctactttttaaaatgtttttgagacagggtgtcaggtaacccaggttttcctcactctaaagttaagaatgctgttgaacttctctggcctccaccttctgagtcactggattacaggtgtgtgtagtcacttccgctccttaaaaaattatttttagttacaataactctatgtgtattcatgttttacctggatgcatgttggtgtaccatttatgcctggtaaccactgatccccaagactggaactacatgagccaccaagtgggtgctaggtgtcattctgggtcctgcggagagacagccacctctctatcccccatttccacttttatgtgatgctgaggatcgaacccatccatagctttttgaatgctaggcaagcagtttgctgactgatctatgccctcagacccacctattttcttgatagaggatgatgacggagttggcttcttgctcagtcaaggtctcaatgagagagtgtgtttggaataatggacttctgacctttggaatgttggaggttaaggttctacttaagtgtataattgccatgtcctctttgggtctgcttttcctagtcggtggcttagaaagttccctttataacaggaggacagaacactagtgtgatttataactgggcagttattccaaaagtccactcagctaatttagagttaattatggttgagatggctttaacttctgcctccatttctacaggcctttcacatgtgttatttatgtaccagtggcttgctaaaagcagaggaccacagggctgcttgtgcaattaatctcttgcattagaccgagagttagctctaatttttcttcttctcaagcatggtctgggttggcccagcctgagcattttttataaggacatagttcaaatattcatttgaacttttattttcttattttcttaaactgagttgtaaaatcaaaggaaaaattccttagaatcagtgtttgtcattttaagaagcatggggtctgaaagatcaggagtaacctgttacaaataactagaccttctttaaaaattattgttttacgagtatgggtgttttacctgtgtgtatgtctgtgtaccatgtatatataccttgtgcccttggaggccagaagagtgtgtcagatcccctggaactggagttatatataggtgtttgtatgatgcctgtgggaatgaaagctgagttctctggtagagtaaccagtgttcttagccacttagccatctctccaccaactcctgctcttcttaatggtagtgtagaattgtgcttttattaatttgatatgtgtgtgtggtaaattttggcctccttctccttttaatgcccaaagaaatatttccatttttttctaacctccaatttgatgcctggctcatagttttcactgtatattgattgcatcttttttttttttctgtcagaagttagttatttgacaaattgggtacgtaagtttgacctgcagtagttactgtatctcaggaaaaaagagacacattttgagtagtgcctcctcatagcacctagttgatagtagaattcatcttcagatattgtgtgtctattgatatcagatatttttattttcctgttgtggttttatcatatttatgctcagcaccctgtttaaccaataaaacaatgtctttttttaaaagattttatttacttattatgtatacagcattctgcttccaagtatatctgcacaccagaagagggcaccagatctcataacggatggttgtgagccaccatgtggttgctgggaactgaactcaggacctctggaagagtggtcggtgctcttaacctctgagccatctctccaacccataaaacaatatcttgagatgtaggaagcttggtatatttaaggcagctaaaatgaacattggattggggaaacaagtttctttaaaggatattattgggagagttgtgaaaaaaaactgagtgaggtagatgagacagctgaatgagataggttagacagcagcattgcattagtgccaacctctttgatttcgatgcttttgttctggttaaccattcagaggaaatgtctgtcgagagataaagaacataatgtgcacaatttcttctaagtgggccagaaaagaacttattttttacacacagagatagaataacaaagtaaatgtggcagaatgaaggcaattagtgaacctgggtgggatgacacatccttgtagccttcctatgcatttggtattttagataagctccccgggtagaattcctgagtcacactctatgaatgtttgattcttctccacagtgccgattgctttccagtacaattttactaattataactctgttggttcccactttcagagcactctgtatgactgtattgtggcacggcatatgtctctcgggggatagtaaggctgaacatctttcagagtattgagtcataacaggcttactcttgccatgttcttagcctttcttactgagctttgaagttcactttcctgctgactttttgtatggcttagtatatgctagagatactaagatctttgttgatcccatggccttgcagcggtccacacacttttggatgatacagaactgcattacattttattggagtttcagggagcagactaggtccggggcagggaaaatactgcatatcaagtgggtggggctggcaagctgctgtgtaggtagggctcttctcccttagctcagttacataatcaactcagagttgcattttctcatctctggcctttctgagaaaggatatttttaggaggtatatctactatccctggtgtattttattcagggatttactgactagctttgttttcttcccctttagatttgtttaagaaatatatagattgctaaataatgaaactgttgcattgctaagtacttggatagagtactctgccttagtggcatttcagagcctgtggagtaagagggtaacttggcagggacacaatcttggatcatccactggcactaattaaaagcaagaaagatttgacctaacttaaaaaaaaagacaatccaataagcattcaagagcttgctttattgctctgattattttgattaacctcatttattgttataattgagttattagataaaacaattaggcaaaaccacatacatattctctctctctgagaccccaaagtgttagtcctgtaaggaaactaaaaatgtccaacttcttcattatataaaagacacccacccaccatggagctggtgactatcctaaacacaacctgactttcagtttcaagtcaattttcctttctctccctgaacccagacagccgggacttgacatgcttgggactgtgggggcaggaagaaaggacagacacacagacaaatgtacagaaagctctctgtgcttgctctgatagggaaaaccttcttggcaccaacaacgcagaatctcaaggcatccatcctgtacaatacaggaaggggttagctagttttggtaggaagtgtctattggccagcagtcttaggtactagttatctgggaggaagctgtggttgccagttcacacacattgttcaatcgcttggattagagcagtggttcccaaccttcctaatgttgaaaccctttaatacagttcctcatgctgtggtgacctcctaaccacaacattattccattgctactttgaaactgtaattttctggctatttagaatgataatataaatatctgatatgcagattatctgataaatggcctcccaaatgggttgtgacccacgggttgagaaccacgggttagaggacagctttgccatcttctgagcctcactccgggaaggctttgccagtgtctgtgggtgaggcattggtgtcattgacatggctgtgcccatgccagcaaaacacattcactcaggacttcatctgctccttaaacactcactcgggtcttcatcccctccttatgcattcattcagaacttcttgggcatttcttgctgggtggtggcggtgcacaccttttatcccagcccctcttattaagttatttttatgaagtcactgggtgtaggtcgctctgtggagacgctgtggtccacctcttcccaccacgatcactgctccatcatcttcaccttgatctttgctcttgtgctcatattgcccactaagcccatttttggcattctgtgtgccccttcagtcaattactctttgcttctatagcattttctcatgtcctgatgctttcttttaaggtattatccaaagagatgagtcacccatggaaaaagggctctctggtcttcgaggaagggtcttcgagctctctgatgtgttttatttctccaagaagggattggaagccattgtggaggatgaagtgacccagaggttctcctctgaggagctggtatcatggaaccttctcacaagaaccaatgtcaactttcagtacatcagtccaaagctcactatggtgtgggtgctgggtgttctaatacgttattgctttctgctgccgctgaggtaagccacctgcctagtttgataatgtcgtcagtccctctttcctcttccttatgtgtgcatggatgcttaagagtatgtggcatggattcaacctcttcccagttaggaaacatggccagatatgacctgcagccctgtgttacctgtgcactcattttacagtttttcttccaattgaagatgtgcattaaaattctctctctctctctctctctctctctctctctctctctctctctctctctctctctctctgtgtgtgtgtgtgtgtgtgtgtgtgttcctttttgtcttatgctgtggcttaggctgacttttgggaattgttgtagctgtgataaatggtgaaattcagaattacatatatactattgctggaaacttaatccagtgcttccaaagtggggttcaagtattctggtagtacacaggactatcttgacatttgggaaggaaatagagtttttttgggggaatttttttttttgtaaaaacagagtttctctgtgtaacagtcctggctgtcctggaactcttgctttgtagaccaggctggccttgaattcactgagatccacccatttctgcctcctaagagctgggattaaaggtgtgtgccaccactacccagaaatactagagcttttaattgtgtaaaaaatcaaagcttcctttgatacttttagagacagggtctcatgaagcccaggatggccccgatctttctgtgtgatctagaatggtcttgatccactgattctcctacctttacctcccaagtgctgaggttaccagcatgtgtccccactatttatcagagcccaccacctttttctcttcctctcaaaatgtatggtagaacaatcttttccttgctgcaccatgctccataatgctctacaaagttacagttttgctgtttaggaggcagtgaatgaattcttcaggtgtattcccactgtcaggctaatgtttgcagtggcgaattcttcaggtgtattcctactgtcaggctaatgtttgcagtggcgaattcttcaggtgtatttccactgtcaggctgtgtttgcagtagtgaattctttaggtgtattcccactgtcagggtgtttgcagtggtgaattctttaggtgtattcccactgtcaggctatgtttgcagtggtgaattctttaggtgtattcccactgtctggcaaatgtttgcagtagccttcttttctttttcagggttactctggcttttattgggatcagtttgctgattataggaactacactggtgggacagcttccagacagcaggtgacatgtctcattccatccagccttctataggactgtcgtcttcccttagctggactcacagagttagaattctggcgagtttgtaggttttgcatgaattttatggtctcaagccacttgcaagaatccttactgaattcatcttcatagtcttcatttggtccctcccccctttcaaattgaaagtagccttttcaaagaaatgaaaggaaaaaagaaagtagactgaaggacccaaaggaaaagtagtctttgacactggtggcctggggaggtctagaccaaagaaatttcagctggtcctttaggactttattatgatctagcagggtgggggcgacttccgactagaattttatctgattctcctggtacacattgggcctttaatagcaaatgcatcgatgagacagcaagaatcgttatttggtgtagcagaacacagcccatgggagcttttactgtgtgtcataggagtgggtatccaggacaaaaccataaaactggttcttttttttttttttttttttttttttttggtttttcaagacagggtttctctgtgtagctttggagcctatcctggcactcgctctggagaccaggctggcctcaaactcacagagatccgcctgcctctacctcctgagtgctgggattaaaggcatgtgccaccaaagcccggccaaaaactggttctttttctttcagaatcaagaactggctgagtgaactggtccatcttacctgctgcaggatctgtgtccggtccctctctggcaccattcattatcataacaagtgagtgtccgccatgtgatgggaaatgttattctgtatatgtttctcttattggttgcggagtaaaacactgattggccaggcaggaagataggtgaggctaggagataaggagcattctgggaaaggtaggcaggagcctgccagagttgtgatgctgccggagcagtaacaccatgctgagcattactggtaagccacagccttgtggcaatacatagattgatagaaatgggttaataattaagatagagctagccaataagaagccctagtcatcgaccaacaatattataattagtataagtctctgagtgttcctttggggtgaggtggttgtggaaccaggtggtaaatctcactacatccatggcttcagacaattccagcaggaagggagtggggtaggggtgacgagaactagaaggaggtcggggaggcagccagtgggatctgggaacttctggtttcatcattgcctgtgttttcagaaggaatacaaaaattaacagtgagcagtgttcattgatggacatttatggtgtgcggagggggtgaacttctcataggttactcctggggaatgagcactgctatcccatgggatgaatggtgggaactttgggtctggttgctaaggatggtgaaagttcaaagtcagattctgagctgggcctgtttgttttgaagatactgctgctggcagtcctggggtgcagctgaggttgaggcctgttttctacacttagtcttcccatttctaaaattctctacctggttcctaagattagatatttcattctgttctcttcatccacaataggataatacaaataactggagaaaatcatgaactaaattaaaatgattgtgattgcttttggattacttttcttataattgaatgctatatttttttttaaaaattcttattatcattctttttgaagcaagaccttgctatgtagccctggctatcttggagctcattaagtagcacaagctagcttccaccttgtggtgatcctcttgccttggtcttctaagtgctgagattgcagatacaagtcaccctgcctggcaacaccatcattatacacattctagaacaagctctttgcatcctaattgagtcttcctgtcccatttataggaagaaacatgttatcatttggtttgagcaagtgtcaattggttcaatgtggtggcccacacagtaatcattgcatctaggaggctgaagcaagagaaccatatgttcaaagccagtctcagctacacaacctgtttgaggccagcctgggctacaagagaccctgtctcaacaacataacagcctataatacttagagcaatcaacataaatcagaatagttgtgattaaataagcaaaatatgaattataaagagaatgtcatggtccttcccacaactcatcatactacatgaggataatgttttaaagataggcctatgtacctaaaaactttttaaaaaatcctaaataagataagtttgtacatgttgctgtgtaaaatgttgagccttttctgaggtgtggtactgacagctgttttaattgcaggcagtacagaccccagaagggaggcatttgtgttgccaatcatacctcccccatcgatgtcttaatcttgacaacggatggatgttatgccatggtaagagcagctcattgatacttcaagtatgtgtacttgccgaattgcaaactagaaagtttgttattagaaatttggccgggacatagcggtataagctacgtagtatatttacacgaggaacaaacagtttaagaaacaaacagtttgagaaagtagctgtaatagctaaggtgggaaaataccttgacagaactttgtaaagttgatttcatgttgcttttaatggccatctggtgtttaattatactgtacaaaactaaaggcaacctctttggagttttacagattccagccagacaattagttttcttctcaggggtataagtacaattaaaaaaaaattgtttctttaaggaggatctggcaaggaaggcaaaatacttgtgcctcagcccagttctcaggttttgtccacagcctccaaagaaaagaaaggaaaagagcagaaaatccagtaaccatgaggtccacagcaaaaccaagtccccagtgccctttcttgggcatgaagaggaaccccactctggtgtctgtgtctgtctgtccacaccccccccccccgccatcatctgtggctctaacagtctgtctgacatttcttctgctgggtgaaccccagatgctgacccaggctcctcttctgcttgatgattaaatgtgtcctaagaaggtgtggggcacaggatgaccagacgtgtgtccggggttgctctcctcttctcacagttgtgggttgtggatggggggggggtgatgctgtgaaggcaagaggttcactggtcagttttccagacagatattggtgatctagtgtgcatttctgggaaagtctttgaggggaacccttacaacttaagtgtgtgctgtgggtaagtgagtggggagtgccagcatgcacactggttttcactatccgtgggctgtatgattgacaaggcctatgtaaaaattcccacttagtgctgagtgtttgctttgtctaaaattgtaagttcagtgacttcagatgtggcccagtcatagactacttgcctagcagtgtgaagacctgggaactatccccagaactgccagaaaagaaacaaaaagtctaaaataaatgtaaaacctggacatggtggcatattcctataatcctagcactcaggaggaagaggcaggaggagagctgtgagttcgaggccagcctggactagatagcaagtcccaggctagtcagggctacacagtgagaccctgaagcacagacccatttccctaccaaagtaaataaataagtgaaataaagtcttcagaacaaataactcttagacaacgactgtttaatacatcattaatttaagtgagcttttttgaacctaaagattcttttgtcatcttcgagaaaagaaatagaaattggtcgtttatcttttggcagattagtaatcaattgatagttatatacattgaaaaataaaaagaaactggaaaaaacatacaaatatcatacagacacaattttctatataatttcagtatttaggcatcctccctaaagcccacccaaggcaaccctcaggagagccccagaacacacctggacataccgtatcagccttttctgtatgtggacagcatactccacccactgtatttgattttctctttgatgcagttagatcaggccaggatttcatcatagctggggtggcagaggcttaggcagctgatctgcccatctttagaccaccttgtgctgaccttacagagtactgcagacagggtaatttgtgaggagcaaaagttgttgactacagtgcaggctgaagagtataaagtaaggatgtctagtgaggatctgattatcctgccttcgcatgttagaaggaaggcctagaattacaaaaagaggtctgttccctagagtgccccactttgtgaagatatttattttcattgtatgtgtgtgaatgtcttgcctgtatgaatgtctctctatcatgtgcatgcaacactaggagaccagaatagacagtggattctctgtaactcgacaggtgtgaacttgccatgtgaatgttgggaattgaacccaggtccgctgcaagagcagcaagtctcttaactgctgagccatctctccagcatcagccagagctctaatctgttcatttgagcagaggtgttgtgattcagacccgtcacattaggtcatttctccagcaccgttgcctgagggactcagtttccagtacatgaattccaggggaatgtgctcaaaccatagcaactgtttaattatgactttgtgtttctgaggccacaccctgtttcttctgtgctctggccaacaaagaattgattataatactttagaaactgaagacctcagaatatttctggtctctttgtagattcactgttgcttcattatcctttcctatttcttcttgaaggattaaaaagtgcaaatgtatcatttcatttctcatctcaccccaaagacaacatgcttatctgttcttttgccttttgtaatttaactccattgtctgaaaaccatcactccttatgtgtcctcgaggtcagccttgttctttgttcagctgcatagtattctgctgtatgtatgcatgtgcatgcacactcactcacacacacacacacacacacacacacacacacacacactcacatgcacacactcatgcccgcacacactcactttcacacacatttacaatttcacactcacaatcagtttaatgatcacatgcactcacgcagacacacttagacacactcacaccccccaccactcaccacatcattgacactatttgttatccatttacatgtttagatattttttcaatattttgcagtaataagcaatactatagctaataatctttcgagtatgtagtttcatcttgccggtttcagggaggatttctaaaagagaaattattgaaatggaggctaattgaatatgtcatcttgacagctgttaaatgtccccactcttttccccaaagccttgcatgggagtgtagtatccaagcgcaatatccttgccattcgggtgcatttgaaatcatagttcagtgcatctttaacttgcatttccataatcttgatgaagttgaggatctctgtggagcaaagtggctttaacgtccagggcactgcggaagagcacattttggcttgcattgagctttgcaaatcctttgactagatttggaatttaattcaaattgtccaaattgttggtaaaagacagccagtattttctctgagtgaagaataggattccctctctaggaaagacagggtttttgggtggctgtacctttatgtttttctgtttctcctggtgcttctaggttggacaggttcatggtggactgatgggaatcattcagagagccatggttaaggcttgtccacacgtctggtttgagcgctcagaaatgaaggaccgacacctggtgactaagaggtaatcagtgcagtcctttgccttcatttgcagtaacagaggagctgattgacttgggtcttttgtccaaagggcaacacacacacacacacacacacacacacacacacacacacacacacacacacacacacacgaaaacaaagtcccgcaaagctctttttttctggagtcattaacaggactcatgtaataattctatagtcaggggcatacatggctgcacataaccagaccagaaagctcaggtgtctgttttgctgtgacttcagtacggtcactgaacttttaaaagcttaaaattaccaccttgagggttaaatatagatcagttatttgctgaataaatgattgtttttgctgaatggcctctgccactcaaatctagttaccagagagctgataatcactgctcttcctttctgccactgtcacaaaacttaacagggagatcaacttaacagggaaagggtttatttagttacctggtttcggagtagagtcagtgcctggtcccttggctcttgtgcttgggctcctgaatcttcctgccaagagcgagcacccagtgagtaacatctttcttctaatcccacctcctaaaggctctgtcacccctcagtagtgtcacatgcggcagctaaaccatgaacacatggctgtagagtacacctaaactacagcagatctttatgagaatggagggcaggtctctgtggagatgaagccaccaggaagaaagctgcccaggctagacttacttgtgctagcctcctgtctcattctcctgagtgctggattaccatacctggcttacgttgtttgatttcataggaaagttcatccagactcatttgaggggtttcttacttattggctataatgcagacagacaagcatgctcagaattcccaatttttttcacacaaggaatatcagcacatggagaagggcggagtgctaatggcacatggctatctagaaatcccttttaagcatagacagccgctggaccagctaatgcatacctgtagtcccaggacttgggaagtagaatcaggaggtcaggagcttaagatcattcttggttatgtaatgagttcaaggccagcctaagctaatgagaccctgtaacaaacaaagtaggatgaagttaccaaaactcactcacttcagagaaaacgaaagagtgccgatttccttatccccgaccctttgtctccttttcttttgtcacttatttctgcccttatgactttttcttcctgctggcaggatgtgaagaacaaggactcttatctctttgtcttcaagatcaactcacagatcctatatttttttcttacagattgagagaacacgtggctgataagaaaaagttgcccatattaatcttccctgaaggtaggagcagaggctgcctcaggctatagctgatggcagcaaaccatctgaggaacactctaggtttggcactttagagctgtcttagaagaagggatggatacttttttgtttgtttgtttgtttcaaaacagggtttctctgtgtagctacagagaaaagaaagccttggagctttctttgtagacaagagtagtcttgaatacctgcctctgcctcctgagcactgcgattaaaggtgtgtgccaccaccaccggtggctatttgatttttaaagtaatttttccatagtggtattaaacagcacagtctatgactttgtatgtgttattcttgaaatgtattgaaatagtcaattgctgtgatggggttgttgctgagtgttcagtggcgatgagaaagtttgctgttaaaattgctcaaaacttttaaattgttttttgaagcaagggttgacttgcgaagtagcgctaaagtatctgctgcttggatgatgattaggattatagaaaagtaatttggggccagtgaaatggcttagtaggtaggggagcttgcctataagcctgatgggctgagttcaatttctgggacccacaggtggaagagaggcatgattctctcatgttgtcctctgacctccaaatgtatacatgcacataaaaaatgtaataatctttagagcaattcattttaaaatttgtttttaaaaagaggcttacttcctcacatcctctgtcaggtacctgcatcaacaatacttcagtcatgatgtttaaaaagggaagctttgaaatcggagggaccatatatccagtggcaataaaggtaaaatagagttttaaaggtgcagaggggtggggggcattggattgttaactttatttgatatagttgcaaatttaaaatgtgtgagactagagaacacttgtgtattcagtttctttgggtacattttgtgctcattctctctagatagataatcaacaattggtagacagatgatacatacatgcacagacagctggtagatgacatttgatgcacagatagtgggtagatagttagatatagagataggtagacagatatgcattgatggctggacagacggacagacagcatggcgatgcagcagagggtgtattaatactaatactaaggatattgtggagagcaaatctgattgacctctgctttcactgacttcctaagtgtcacatatctgggagatacgcaaacagctttcgtagtgcagtactctgggctctatttaacagagcagttggcactgatggaaagcgttagtgggattggcttagttcttgtgaagtctatcaagtgaagtaaattctcctggggtccgaaagactcatttatctttccacctgtgatgagagaagccagcatggaattcatggttgaaatatctttcttctttttttcttctcagtataacccccagtttggtgatgcattctggaacagtagcaaatacggcatggtgagctacttgcttcgaataatgaccagctgggccattgtctgcgacgtgtggtacatgcctcccatgaccagagaggtatcacctagatactttccagtctttgatgcttatttaatcagataaaagcaagaaaacttttgcctaaagctttaggtattttcattactcccatcatgctttgttttgttcttagtgaacaggttgtttgtttgtttgtttgtttgtttgtttgtttctttctttctttcttttttttttttttggtttttcgagacaaagtttctctgtgtagctttggagcctatcctggcactcgctctgtagatcaggctggtctcgaactcacagagatccgcctgcctctgcctcctgagtgctgggattaaaggcgtgcgccaccaatgccgggcaacaggttgtttcttggtgatgtatttagttatataaaaacaaataagaatgattatgagacattttaaggtctttaaaaacttcatacttaagatgtgtaactttttcatttaatcaggaaggagaagatgccgttcagtttgcaaacagggttaaatctgctattgctgtacaagggggactgactgaacttccttggtaagaatcctcttagaagcaattgtcttcttttgtagaaatatatatatttaacaaaattgcactggttagctatagatttggcagaaactatgcaacaaagtcttaaataaaatagaagcttttctctcccacgtaagcatgggagtccaggctggcataacagctttgccctttttcctataccaacctcaataggtgcttctatctttttggttttttgagacagggtttctctgtgtagccttggctgtcctggcactcactctggagaccaggctggcctcaaaactcacagagatcctcctgcctctgcctcctgagtgctgggattaaggtgtgcaccaccactgcccagcaggtgcttctaccttatggcccaagatagtggtttcacgttcacccagtgtgcacagcttatggctgactggggggccttgaaaatgacacacccatttccataggcaaacacaggggaaatggcacaagtaacaaacttgtatcatttgctgcaagtcttggggtagcagttagctgcaaaggaaactggataatgtagtatttgctccggatgttggaaaatgaggttcttttactgatgaagaagggagagggaggcttggattttggggtagggctgtttgtgtttcattctcactgtattagaaaactgaagaactggaagaaagaagtaagtaaaatattttggcaatgcataactatagctttcactttttctttctttcttttttttgtctgaggaagatttaatgtaggtgcatgtgtttgtcagcttgggctgccgtaacacaataccacacagtgatgtcttcacagaatttgttttctctaagttctgaaggctagaggtttgagcttagtatgcttcatggtcagtttctggtgagggttcttccctgtgttccagaaggcagctttctccatggctcatgacctttcctctgtgccagcatggagagagcaagctctccagtgtctcttgttagaagggcactaacctcactattagggccccaccctttcaaccttgtccaaccctaataatgctctaaagtcctcattgtcaaatattgtcacatggggagtttagcttcaatttatacgtttgtgaggatagaaatatttagattaaaggagtgagcagtaagggttaactatgcccaccttggagtaggaggtcagtcctcgtatgagcgagtgtcaccagagagtctgtatttcaagtccagcaagtccagtaaagtctctatgacctctctggatgtttcaagacactttatatgatgtgctaagttgaggcaattgcagtgatgttcaaggatttgatttctgtgttaatagcagccaagaatatctgcagcatgggggatcagggttatttaggggttacgtcttcaaagatgggctggctagcatgttatattcttttatccaatagtaggacatatcactaaaatatatttgcccactcacctatcttgaaaccagctaatttataccaccccatcctatttctggcaaacactgtgcttttttgatgctaatttttatagcaaaaaaaagtcattttagacattactatgctaattaaccatctttggaaattgatgggagatgaaagtagatgccaggcgactcccttggggtatgaattcgtcagtgacagcaactgatttgttctaagccacaggctaagatgaacaattttacattatgcaatctaatctggaattgctaaactggcaaacactgtaacatcacaaaactccaggcctccctgaggctaaaggtgtctcagtgattcttcaacttcatatgcatatagctgacttcctctttttcctcttcttaaaacttctttttccaaaacttcctcttacccaacacgctagccctgtctgaagctattaggaaaagttgtggctagatctgtggtctctgacccagggaaagaaagagcacacaggctgtcagccactcactgtcagattcacttggcatctctgttaacagtgatcttcacctctaatcctagtattgagagacagaggcaggaggattcccatgagttcctggactacctggactgaatagtgaatttcaggccagcctgagctacagcgtaagaccttgtttcacaaaaacaaaacaaagcaaatcctctgaactttcctatttcctattactggatcacgtgccattttataaatgagattacttttaactacctggcctgtttttctggaaggaaacgagccttcctgcctatctggatatatttaatttttttgtttttgttttttgagacagggtttctcaaaacctattctagaattcactctggcctcaaactaggaggccaaagtggcctcaaacttggatccacttgcttctgcctcccgagtgctagaattaaagacatgtgccatcatgcctggctttttgctgtatgatcttaagctggctgttagtggctacaccttcctgaaagaactaagatctgctgttactgaagtggggagtttgatagaacttgaagcctctagaggcgagagatcatagctggggtggttcactgggtggctaagaagaggaaccatccaaaggtgatgccaggaggcttaagagcaggcattaagatcatcaccagcgtttgtattgttgtccattttggtttgggccttagaaaaagagaaaggcctttcttctctctcctttttctttattttttactactcaaaatccatttaagtcctacaaataattacaggtggctcatttggagaaaagagttttagtgtaccagaccgcaacctgtagttttgttttatgggaacttcccattcccgatcccctgtaaaactctgtgagctgtggtccattttcaagttgaaggctgtgctttgggcttgactctgtgaacctgaacattgctctggtttcaggcacgtgtctgtatgaaggtcaagttctgtccctgtggcatctgagtaacacatgatcattcggcactgttagaacttgactaactgggctaaagttcaacagtcccaatagaaagcaagcaagttcttaaccccctccctccaggagttaaaacctagcatattataatgggggaggaataattatggtagtctggtttccttccacctctcctagttttgctgttccttgtgtccaaagaaggaaaagacacttggagcccttataacccagaaaggtcttgtggttcacagccctgcagagagttcaaagattcaaggctccaagtgcaggaaagctgttttgtatcacactagcttctgtcaaatgcaccttacaattttgttgtttatcttgaatctgttttggagtataaaagtgtgaatatgttttgtataaaaataaagttgttagtcataaggttagatttgaataactatcaaataatttatttttaagaaatttgcctgtttataacccatgcgtgggcagcactctcatcattttttatgtgtgtgttaacaacttttcacggggtttctcagcaagccacagttaatggaaaaccaaaaaacaaaaaacaaaaaaacgtttgttttccaaggggggaatctaaagaaacatcttaataatccttgtttctgtttaaatattgaatacagtaaatctaatttctgaaacaaaacagaatagaagcgagggatgtagctcagtggaagagcacttgggtagcatacccaaagccctgggttcaattcccagcaccagaaaacgcttgcctcttcaagggagaagtggaatgcaggcagtattactctccatttttttgtttgtttggttttcgaaacagagtttctctgtagctttggagcctgtcctggaactcggtttgtagaccaggctggccttgaactcacagagatccgcctgcctctgggattaaaggcatgctccatcactgcctggctactctccatttttgccaagctcagagagcatgttctttgcccaaagggacacatgcttggtcatttgtagagcagaaaccagaacctgctcttcctgtttctattaagcatccgggcaccatgaggcatgcgttttcacatggcccatttctttactggcggagtacctttcccatgtgtacctttctgtccgcagggacggagggctgaagagagcaaaggtgaaggacacctttaaggaagaacaacagaagaattacagcaagatgattgtgggcaatggatctcccaacctggaactggactgatgtgctgaggatgaacatggcttcccagaactggcctttagaagtgaagttttataacgtgttttgttgtactgtcttttgcttatttatcgttaatcttttctactggatgattgtctctacctcttcatgccagaggcaggacctacaggtgcccctttctgacatttttgttatagtgtggactcagtgaatggtaagaccgattcttgagtggaaacagattctgccttttgtaaaatgatgtatcattgatgattgaatggaatatttgtatgtaaagtgcttctacgatgtgtttggaacttgttaataaggcatttctcaaaacaactccaaactctgcagtttgatttccctctccctttaatctcttttattattattattttttatttttttgagacagggtcttatttatatagcccaggctggcttcaaactcactacgtagccaagtggccgggaactcttgactatcttggctccacttcccaggtggattacaggcttgtgccagcacacctagctgtggggtgactccacagtgcattcccattaaggacacaatcatggttacattctgctatacggttgagagaaaaatgaggattgtttttaggggaaaggacaactctgtggtcacttgatctgaagagagactggttggttagattcatttaagaaactaaaagagctgcatttgttcccacaacacatttcatccagccacagtgagaaacgcatggttagcttttcttgtttgaatactaaagatctcctttgtctttttttgtaacaaaacatgtttttcaaagggaagaagtctttagaaaaacaatgagtgtatatggagcttgcctcctgtccccccaccaacctcactgtagtggtttagtcccaaactttcccagccttttaagcagaaacctaagtggtacgattaccttttggaaactgagccttaacatgtttaaaggagaaacaagcattctctgagtccaatggcatgagcaatatttgatagctatgtatttccgatgtaagctcttgaggttgttagctcaagagtaaccctgtacagaaagtgaactgtcttactatgaataaattttatatttttaaatgagtgttgcattactcttcctctgtttctccccttctcctgttacaaacaagtgttgcttttgcttccatgacaaatttttattggacatgtgctagctagttttatgtcaactgggcacaagctagagtcatcagacaggaggtagactaaattgagaaaatgtctccatataaagttgtgttgtaggcaagcctgtggggtgttttcttaattagtgatcagtgggggagggcccagcccaggggggtggtgccattcctgggctgtgatcctgggttctattagaaagcagactgagcaagccatgaagagtgagccagtgagcatcactctccatggcctttgtatcagctcctacctccaggtttgtacccttactacttttgataatgaactattatacagaactgtgagtgaagtgaaccctttcctccccatgttgcttttggtcacggaatttcatctcagcaatagtaaccctgactaagccagaacagaacatcaaacaccactctctttttcaccttggtgtgtggcctagctatttggaatctggcccttgaatcccaccttaaacaaagccaaaggctgggggtattttgcaggtgaactcaggcaattaaatgtgattgactagctaggcaggcctggcaccagttatcagtacccctttagatgattagatccaaggacactgcccaggggtgtcccttgtggccagtggcaggggtgtccctcatggccagtgtcttctgttccctgtctattgttgcttcagttttgtctctccctaaatccggaccaggatgattgtgacgtagcatcagcacatacagctgtgctaaagtgaccctttgtttgatttacttgttatttcttttttctcagaaagagatgttcctggattttttttttttttttttttttttttttttttttttttttttttttttttttttttttttttttttttttttttttttttttttttttttttttttttacattcggtattcagtaaggcttgaattactaaatccattccatgttccagttctcagaaaagttattgtgtttggacacagagcatgtctttcgtagagagcttaggagaagccataaggctgtcatttgatttgtgctagttaatggagtgctactattgagacagggactctgagggagtcactgggtaaatgtggtcctataggaagattctcaacccagtatgacacacaaagatgacacacagaacacgcagaccagaggaaaaaccacgtgaataagaaggcagccatgccgggcgttggtggcacacacctttaatcctagcattggggcagaaacaggcggatctctgtgagttccaggccaggccagcccggtctccagagtgagtgccaggataggctctaaagctacacagagaaaccctgtctggaaaaaaaaaaaagcagccatgttcaaatttcttacctcagatttctggtctatagaactatgagaaatttgttcctggtatcttgttacagtagtgctagataaccaatgcacattaatcaaatgccaggagtgaacaccctcattaaggaacaaatggaggcatgggccacagtgggaaggatgcacatgcctccctgttactcctaccaagatgtaatgcctataccaatcttgagagcacactagaggcacccaagtcaaggaaaacataaaaaaaataactagactatcattttcaaaattatcagtcataaatgcaaatgaaggactgaggaatgatgatgcatttacccactgtttgagcaaaatcatggtcaagctacagtccatcctggagtagtatggggccttgggactaacagtctgaacgtaggtatgccttgcctaactccatgtaaatgtcaaacatgacaccttttcgtggactctttctccacggagattcaagggcaagtgacatactaggtgaagctgtattctcccaaatgtcttgcaccattgattagccaaatttctgcagaactttctagataggtatggattcttagagtcatttcttctcatgtcctaagcaaaattattgttctgaagggacaggccctgaagctacccacaccagtgttaaagttaaaacctccctttttatttagatggaaaagaggagatgatgggggatgtccttttgtatgctgtgaataagtttcccaggtgggaaatccaaacaggaataaagaaaggtagtaggtgaagtcaggaagacaccatgtaactgccaaggaagcaagaggcccaggcatctcagtaagccaagactacttggagatacacagattaagagaaatgggttaataattaaccactaagaagcctgatcttccaaagagtctataattaatataagcctctgtttatttgggactaaactgctgcaggaccaagcaagacagaaactttcttctacattaaacatagccttagagcaaggaatatgtaatttgtaggattcctctcactccctgccttcacagtgggacctaattttaggtttgaaaatacaaaatgcccattacagattttgttgaatatttacagaatgtaaatatctcccctgtaataacatttgggactataaaacaattaagccagtgttaatcccaccagatcagaataggatcaactttttgagccaaatttgaaggaaatgttattaaatagtggccaggatgatggacactggccatatccatacctgagattcccagagaagggccaaatattacattagtccattgcttataaaggcaaaccccacaaggctacacacttccctctttcattcaaccggggacaaatacacatccttacatacttcctgcctacatgtgaccaagcacatccggtgtggttgggtaaccaatcttatttacagatgtgaaaacatgtgacttgttatcttacatgaataacaaacagctctcagcatgctagaaagttatctgcccttgagtaagtgggtcttacaggttagaggcatttttgttttctaagatttcttaagccttgtaattaaaacttaaaatataacgttagccctcacaccagattaaatattaactaaatcaaactaggttgtagatgggcaattgtggctgggagcttctggaaatttcctccctgctgcaaggaaggcagtgtggggatcatctgggaccgtgagggctactatggtgtgtaggttctctggcagctgttcagcacacattctctgcttagcacagggcagacagccagggagagtcgctgaaaactcataaggactggggcagccttgccaaagtctacttccccttttatgagagacaacagagagaaataaacatttggaggctttgcatagctctcaacggtgagtcaaccccttgtcggcagagggaaatcaccaaattcagtaccaaacacgagtttgtctgagccgcagagtggttaccctggcatgggacactccactctcctatctgaacgtagaagggataactcatttggacagggacttgaaggaacacttttgtcctgggaagtggagggtccacaatgctgttgtttccctttcaggggaacataagaaggcaggtgtgggggctggagagatggctcagtggttaagagcactgactgctcttccagaggaccagggttcaattcccagcatccacatggcagctcacaactgtctgtaactccagttccaggagacttgacactcatacagacatacatgaaggcaaaactccaatgcacataaaataaaaataaataaaaattcaagaaaaaaagaaggcagacatgttagcagctcatgtttcaggagacccatccctgttaccaggagggaattcaactttatagaactagaaaccaacaggaaccagccatgtggccttaaataaagtgatgtaaaaagcagcagtctggagagatggcccagggggtaaaactgctcgctcctcagtcatgaggacaagcacttgatccatcaccttagagcaagtcagtttccccacattctgaactccgtgcacatgtatccatcacacagagacatttaaatacataaactgagtacttccaagtgatgaaagaaagaattcgttttctcactgtgccctgggagttggtctggactgaataaaagcattttggctgtgtcttcaacctttcccctccattctcttttcttctatttatagcatgactcctttggcacatgtctggctcaggttcttcgtgctctgttcattctgacttgctattttaaacactgtgcggaggtcgtcttgagctacagtcatgtgtgttagcagcaaaagtcacttgcctaataaaggctcactgaagtggtgtccaaagtagatttttttttttttaaaaaaaggactattttttttccaagtaaatcttcgaatttttctcagatttgatttagagtaagtcatattcatttccaagatctcatttctttctgacatggtattgtcaaatagttgtttccatcattaaaagaaaattcagtttcataaactacaagtaagtaaaaatcttaaacctaatttcagcatctactaagaaagtaaatggtgtcatatcagaagttgcaagaactgctacatgcttacacctttaaatttgttatcttatctgcaatttctttcattttaaatgatgttttgaataaaaattttactaatgaatttcagtttttgaaaattgtgtactgatatgtccccctccattgccttcctcccatcactgcctaccttcctacacccaaatttctttcccacgttcctgacttttgttttatcttccatgaggttaactgtacctgtgtgactatggatttggaactgtccagtgatacctggacagttggatactatgagttggatactatgcctccccctcccagaatctgttaacttctcatagtttagcagtaagtggcaaggtcccatgagcccctctcccatctctagctgaccgttggctgggacagtcttgtgtaggcccagtaccagtggctgaggtggtgtggcttcatgattgccatggacatgtggtgcttatcttacagtggttacattccttctgctgcctctgatacagtgagctctgagacttaagaggttgctataagcatcttgagggctgaactatcagctgtcaccatcagctgtcgtcactcattctcaggatcttgtgcagtcatgggtcacttctgttcattgtaaagggagactttctggttaagaccgagtggcttttgtctgtgggtgtgtgcatagatatttagaaggcagtctgatgctgtagggtctcccctagggtcccagacttcatggggttttgactgggtttgtagaaccaggcctgagttccctcttgcagggcaggactcagatcagttagttcgtgtgcctatacatggtagtcattctcaacaggagattttgttctaaatgatcaagagcacatggtttctacagcctaaagtctcggaaggaagtctaaaaaggaagcagatcaagtttgagaaacgcttttaagtgcatctagctgaaggcaggcctgaaggaagcccctgagagctggcagacctcaaagatctacatgaagaaccaagaagtctgggtcccctcctctggccttctcactgctgctgacccattataataaatgttggaagaacttggttggtctaggctggaaggggggaaatacagtggatcttctggcaacaaatcaaaataacctttggattaatcacctgtcctatagtgtacctttctgagcaaaagctttgcaaacattcattcagtcatttatgcatgcattctttggccattcacagaaaaatgttttctgggcaatacagaaatacctttctacttgagttctttgaccatctctctgtcccaagattggcaccatcaagttgtctgctggtgatcccctagcctgcctgcctgccttccttccttccttccttccttccttccttccctccctcctcccccccccccccgacagggtttctctgtgtaacagccctggctgtcctggaacttacagagatctgcttgtctctgcctcccgagtgctgggattaaagtcaagcatcaccatcgtccagcttgtgttctttctttagtcttaggttagatatctctagctcttgaagtagatgaccagaccaagccccaaatggatgagtgagggttttgagcactggcttcttctcatgaagggtttggctgtagcccctgtgttgtggacaaataggggcagagctgtgatgtatagaaaggtggtttcaagaattgaaaggtggagttgaaatcagagtgactgatcatctttacttagtcctcagtaatggactttttaccaaagccaagagatttgcgtgctttcctggaagagcaaggttcatctgccactgccgctgctttcacagaatcggttaagccacatagtgggcatgtggccaattgcattatctgcctctcagcttttctaggtacaaaatgcattgtaattgctgcttcttattcagcacgccaggaactctaatcctgcaagtaaatcattatcctcattttcaaatgagaaaagtggaggtcactgagcctgggtgagagatggagttgcgactgctgtgtttcagttatttttcttctgctgctttactgctgctttttcatattcgctgccttccctcatcatcactgcccccttacagctcctcctacttgagtgactctcatctcctaagttctccatttctcttctctgttggtttctctggcgacacttcaaactttgttgcccacgttccttccccctacacacaacaggattctcctataaaatatctttcatggggctggagatagtcaatggttaggagtgcttgctgtaaacacatgaagacctaagtctggatgcctgcaactccaccccatacagtcattacattccatgtcattccttcttgctagctgactcactctagagcattggttctcagtctcaagtgggtcagaacccaattagcaaatttctatctccaaaaatatttacattatgattcgtaatagaggcaaagctatagttatgaagtagaaacaaaattaattttgtggttgagggtcaccacaacatgaggaactgtattaaagggttgcagcattaggaaggttgaggaccactgtctcggtgctgatgttgagggatggtgccacgaacccaaagctgcaaggggccgagggatccccaagaattgcatgagtaggaatgtggcttctttcctggttgagactccagttaaacctgaagctggccaacatctggactctagctttggccttggtaccagagagcccagccaaatcccatccagacgcctgacctggagtatctctaaacaacaattgtgtcttattttaagctgcttgtggtgactggctgctcagaaataggcggctgacacctacctctcctagtccctagccttgaaggggtggcagagctactttgtcaagcaggtctcagattgctcaaaacagtttccttcctcttccagggaacggctatgtccctgggaagcagttgctatctggctgccccatttcccaatgtcccctttcatctgaatggagccattgacaggttctcaaagtgagaagagaatggaagccatctgggtcatttccagcaagaggaagttaagaaatgggtgtgtttctccaccctcttggcctgtctgcttgctggaggcagaaggccaaggtccaagagtctggaggagctgcaagactaaggagcctgggcactttgtttcacctcataaagggacttggaacacctggatcacacgtacaagagtgaggaaaaaacaaacaacccgaatgttaagccgtaggcgtcctgggttttgtttattgtagcaacttatttgtttactattttataaattttcttattttggaaatggagataaagttatgatcgaatgaaacagcttatttgaaacagtcatcaaattttaagctgtcataaactgacgacagtgtcttcacagtgactctgaggtgacaggagaaggaatcccttcatcattttctgggtgttgaaaccacacagagtggttttatgacttgaagtcagtgtgtatgttagtgatggggctaagactctccctctcctgtccagtcctcttccagagattcctgccaaggcgtctaagagtgggctgagcagagggtgagacttgtgggaggacattccttctgaactagagagtgatttcttccttccttccttcctttctttttttttcttttcttttcttttttctttttttttttttttttttttttttttttttttttttttttttttttttcgagacggtttctctgtggctttggaggctatcctggaactagctcttgtagactaggctggtcttgaactcacagagatccacctgcctctgcctcccgagtgctgggaataaaggcgtgcgccactaacgcccagcttagagagtgatttcaaggctgcccttgtacaatcgaaccaaaggcctctatctgcattgacttcacatttaactgttagctcatgcaaaagaaatatggttgtgtacacacgtttggttaagagattaatgtatatgtttttaaaagtgattcttgaataccttccttttgtataactcaattatacaaaatggagttatacaaattatacataatattatacataatggagctattttattatacataaaattatacataatggagttatacaaaagtaagcccaagacaggtcatttagctaggtgtactgtccttgaaatttcccacattcttctgtgaaacatttgtcttctctagatggcctgtgccaagcccagtggctcttccaaagcagtgtacaaataggacacaggtgctgtgacctccccagactagaggagagctttcttggaaaaagaactgacttcctatcccagaggggatagagtttgcaatagaaagtgtgtgctgaacctcgtgtgcaactacaatgctggcattcaagatgcccaggtggaaggatggtgagcctgacatcagcattggcaatgcagtgagagcccatctcaagaagatcaaaacagctaacaatccaaaacaatgaaacaagaaaataccctcaaagccttaagtttagctgcatctttactagataggagagaacctggtggaacaaaacacagttcctccttcatagaagcagatgactacaggagagaaacaaccaaacagaagtgtgtgtagaataggacaaaagcaaaattataatctgtggctggaacgtaacacttgatggcatctttctaccaaaggaagccagtgagggctaaagttatgttttaagttttcattaccaggcttaagagatctagaaaacaaaacaatgcctctaacctgtaagtcccaattgtccaaggacagataactttctagaatgccaggggctgttgttcatgtaagatgacaagccacatgttttcacaactgcccaggatgtgcttggtcacaggtaggtaggaggtacgtaggcaggaagtatgtaaggatgtatgcttgttcccggttgaatgaaagtgggaagtatgtagccttgtggggtttgcctttataagcactggactaatgtaattttcaggcattctctgggaatcccgggtatggacctgacagtgtccattttcctggcccagtatctataatgtttccttcaaatctggctaaaaatatgatagtggtcttgttctcaaccagtgaaagttttttctctattgagtatacggaacttttattatggtgctagaaaccttgtatttatccaagaggccaagcacttctattttcataaactcccattaaaactgcatgcaaagacagcacctgataattgatgtttgtgtgcagtaaatcttaacagaaaacggtaggtgagctttgagacaacttctcgggctcaggtgctctgtcatcaaggctggtgacagagacacagacttgtgatttaccaacaggtatcagatttaaaataaagctctctttggctatgaatatggggagggtgataagactagtggatgggtgagtactagggacctaagttgtcacagagtgtctggatacacaaaatctaaacacactgcaggctgatgctgccctaaaagaaatgaccacacagcacctttccacatctgtttgttttaaaccattgcacgcagggtgccctgccagacacatctataactactggagtgcattctgaatcatccagattttcaacctaataggatttgtgtgggcataagaaagaaggatttggctatccatgtgcccatccggttgggaagcgagggaaagagtatgctttaggcgccaccttgtgggctctgtattcagcattgcgactacattgagttcaatggaacgagccaggattaagtttaaaacttgcaaatggaatctatttcaactagattcaacacagaatttaggaatttctgtgggaaccaaatccttggaaggtggatccaacccggttttagttccacttcaggaagatgggctgttacaaacaaaagatccaatttcaaatcaaatagct

SEQ ID NO: 25 - DNA, 80567 bp, Cricetulus griseus
  >scaffold_16 dna:scaffold scaffold:CHOK1GS_HDv1:scaffold_16:33019037:33099603:1
  misc_feature 30901..31000: /note="n is unknown"
  misc_feature 37971..38070: /note="n is unknown"
ctctcttttcctccctcccctccctgctaggccaagagtggaggagactaggatgctgccatcagccacagaggccaaagggacacccttctgccttggaccctgttcctacctggcacaataagtgccctgcctagagtgtcctgcaggttgtctatgttctctgctccccagcctggtgccacaagcctgtccacacacgctgctgccagtgccagcgccccctgctggctccttttgccctatggtccttaggatcccacagaccagatgctgctgtaatttttttttttaatgagtccaaataaaacctgagcccaactcccacccatggttcttctctgtgctgtgccatcatcataaagccccttagacattcccatgagacagacacctgctcagcctttgacggaaccaggtacacttcaagacatacagagttctggaacctgtgctttcaggagcactgtccccttcacagcagtagggtggtggcctttctctcagctccccagatgacaggagtgcaaccagacagtcccagtttcagcctcagtgcccctttagagtggatcctaccacctgcctggttcatcatgtctgaggatgctcaggtgggcagaggatgaggatgtctgtacaatttcagcctgtgtgctatggagacaggggcaccttatgccttccccagaacacgtcgacaaccatagtgaggacagacatagcagagcagaatgacgctgaggcacctcccacctggctccaggcatgctcacacaggtgggctttcctttcctgccaagcccaggagcctacaggacagcataaacaaaagaaaatggcattggtatatttggaactgtgaatatggctcagtggtagattgcttccctaccaagttggaggctatgggtttagtcctcagtatagcaaatgaatgaataaacacagctggtatgtaccttaataagccttgagaagaaattaaggaaccgagagtttaaacaacttgccaagagcacaaagctgagatgcattaggactgtgcacaaatcagatggccttgttccggaaccatttgatcccatgctgtgccatggcctccagggtactatttcggagtcctcacccctccaaaatttcaaaacagtacaggtacctagcttgactggggtctagcactaagctgtctcatccttggaaactttcccagggatctcatccttgtcttggatactcagttggggttcagaactttgaagtccaggtctccaatgccaaagccagaactggagaccacactggtccaagacactcccacccagcttgtgcaatagggagcaggggtcaaggaaagcccagtccacctgcccttgagcttcggtatccaggtgagtccacctctgaggaggaaggagaaaactgagggtcaatggtcccacagatagaaggaagggtagagaggctgagggcaggcagtgttcctgcacacactacctacccagctcacaaatttcaggaagttgtccccatctgggccagaagagaaagcagaggaccaaggctagactgggcagtagacctacgaagtctctaagagcctttgcactctctgctcccccatttgagtcctgttccagactcaaatgacaaacatcagtcagcctgctccaggaagacccttctgcaacctgcaggcacctacagggttcccagcctttaacctagtcgcacgctctgggttagcctctggaaaaggaaaagcgatgttctttctggccttagacctgagctcattcaagaagcccgaccccatctcctcctgaaggctcttgggcgtgttgggctgtgatttggggaaaataaaccttccaacctcagctgcttttaactgacttccttctctttcttctttctctttttgttaaaagttaaatattgattggattgttaaaaagtgtttaattatatgtacatgtgtgtatctgagtgtgggtttgtgcacatgagtttcgtgtccccagaggtcagaagagggtgtcaaacccctcggagctggagttagaggcaggtaagagccgccctccatggatgctgggacccagtttctgattctctgaaaaaacagcaaacattcttaactgggggtgagccatctctccagcagccccccccaatttaactttatttttttatgataagatctcactgtgtagctctggctgtcctggaactagctatgtagaccaggctggcctcaactcacagtgatctggcctgcctctgcctcccaagtgctgggattaaaggcgtgaaacaccatacctatctcatgtagcccagaatggcctcagacttagcatgtagctaaagtggccctggactcatgaccctcctagctctacctcccaagggctgagatcacagcagtgcaccagcatgcattctcctgcctctacctcccagtgttgagatcatgtgtagcacagctgctttttagggcacttttggttttgttcttgtttttgtttttttgtttttttttgggggggggggcggacaggatttcactcagtagcccagactggcctcagactttgcagtgatcctccctgctatagtctcccaaagccctggcattatagatgtgaaccaccacactgagctttaaaaagttgactgtaaaaatcactaattttgggccagcgagatggctcaggagatggagtgctggctgctgagtctaataccatgggttcaattcctggaactctatgatggaaagagagaagtgactctggcaagtactccatcctccatacattgtggggcacatgtgtgcacacacatgtgtgctctcaaacatacacacaaattatatatatatatatatatatatatatatatatatatatataaatttgtttttcaagatgatttctctgtgtagtcctggctgtcctggaacttgctctggagaccaggctaaccttgaactcacagagatccccctgcctctgcctcctgagtgctaggattaaaggtgtgtgctaccactgcctagcaaaataaacaatctttcaaattttcttttaaaacatctgggtattggtggcacatacctttactcctagcacttggaaggcagaggcagcagttctctgagttcgagactagcctggtctataggatgagttccaggacagacaggcctacacagagaaaccctgtcttgaagaaaaaaagaaaacaaacaaacaaaataatctggggccagatgaggcgaataactctacttgctgaactcaggagacagaggcaggagaatgaagagttcaaggccagacagagttatagggaggccttgtcctgagaaaggaagtgaatcaagtaaatcaccaaatgcaactgagcaccttagtggtgccacatgggttgtgatgctgacagtcacctcggttacttcactgagcctgtcagactatgttaaggatgactgacacgtgttaccttagccttggagtcatgcttccactatgcagataggcatgattgtcagttcagggatgattgctgaggactggcagtaaagactgacataccctagactcacccagtccccctcctccccattcagggctgacaacatcaagataagtgagactacgtaatgagtctttctctctcaccagctggcttccaaataaccacatggagacttatttattatgaaagctccgctgatagcttaggcttgtttctaactagcccttataacttaaatgaatccatttgtattcatttatatgctgccacatgactcatggcttgtcacctcatctcctacatgtcatacttcctctgtgtcttgtatgattaaggtctctttattccagaagacaccaaggtaaaacacaggccagagctaggttatagaacccagccagcacggccagaacaaaagggtccagggtccccacgtgcagccccttaagaagctctcttatgtcaccccggctttccttcaccacgcccttatgggcgagtcccgggtccacctggtacctgtcccaggactattgggcggggctagggtgtctccctacagtgtctcctccgactctgccgttcttcctagcatcctctgtgtctggaaatcctgcctagttattggctgttcagctctttattaaatcaaccagggtgacacatcttcacagtgtatgaaaagattattccacaacaggactatgctgttttaaaactgatacgagtatctggatctgtgacatcacagggctgcaggcccattagagaggaacctgtgtgcgttcagttgcccagccattcttttccttgggcctaagaacaaaggggcttcttctcatctgttggcattctgaagaaatcttcctcagtcactggaccccttaatcattcagcagatagacttgggtttgggagtaaacattcatcaatctatttaatgtccatgaaactactttaggggccgggtgtagtggtgaaagtggtcaggtgtgatggtgcacacttttaaatccagcactcaggaggaagagacaggcagatctctgtgagttcaaggccatcatggtctacagagtgagttccagggcaggcttcaaaactacagagagaaaacctatcttgaaaaaaacaaaagaaagaaaattgagcagaccagggcatttctgctctttgtttagctggtgggtggcaagctctgtcccttgcctgacaaagaggaacataaagtcaacttcagggttttacttcaccctcctgtatctgtcctggttggatcccagggtcctggggcacacagatcacttgcagtgccagagccaggtgggtggagacaggggttctgtgtttaccacagccctagaatttttgcccattgcaatagattggagtcctgatgtgagaatttgagtagaaccctactgacctttctgcctcagtttccttctgtaaatccatgttatctcagcttactacatgattctaaaagttatacaagaaactgtaaagcagtgtgtgtgtgtgtgtgtgtgtgtgtgtgtgtgtgtgtgtgtatgtgtgcacgcacacattcctgcttgtgtgctcttgaaaatgctcaataaaaaccctgctactattagtatcaacttaggcttccagctcccaggatgaccagatggagtccccaactgaggaggaaggagccacggccactgagtaagtagtctcctggatctcccttctagcccttctgctttccttagttgccttccccactctagttagatctctgccttccctgtgaggaagtgtcccccctccctcatagcctgttactccctatttctccccaaagccgagaaatctgtctgctgacctgctcaagttcttcctctgtaggatgagctggctctgtgctacttaaaaaaaaaatcctaatcaggcctgggtaaggtggcacatgcctttaatccaggaggcagaggcagaggcaggcagatctctgaatttgaggctagcctggtctacagagagttccaggacagatgccaaagctaaagagaaaccctgtctcagaaaaacaacaacaaaaccaaatcagtgttcagataagttactgcagctgtctttgacaacccacaactcccccaagccatggcagtaagaatacaaaagacctggaacggcaggtagaagatgcccagggtgctattaagtggagccctatctgagcctcagtgggtgtaccttcctagagcacaccaacaggggcagcaggtctctgtgtagtgtgacatctttggaccctgtctccctgagatggaggtgccacagggtacccacctggaccagtgctttgggtgctgatggagcccatctgaggaggtgccaagcaggttgcaggtagaggctatacacctcccccatataccaggctgtggtaaaggtccactgaggtggcctctgcctgctggttgggaccaagggatgcctccagaacccattggactttttttttttttttaaacctcctgggatgatgatatgggatgaccttctgtatgctgtgaatatgtgttgcttttaattggttgatgaataaagctgttttggcctatggcagggttaggtgggacatagagaaagaaagaaggcggagtcagggagacactatgtagtcgatggagaagcaagatatgaagtaatgaaccatgagctttgaggtaaaatatagaatattagaaatgggttaattagccaggtgttggtggcacacgcctttagtcccagcactcaggaggcagaggcaggcagatttctgtgagttggagatcagcctggtctacaagacctagttccaagacagcctccaaagccacagagaaaccctgtctcgaaaaaccaaaaaaaaaaaaaaaaaagggggggggtttaatttatatgtagagctagttagtaagaagcctgagccatcaaccatacaattataattaatatatttattcgggaactggctggcaggacgagaaaaacctccagctactttgaagtctcacttgcaggcagatcccagccttagtttgcccacatctaactcttttattccaaactggtagggaaataagccaggatattcctggccaaaggcaagagagacttcatgttattgacatggggcttaggacactatctttttgttcaacgagtggaaaggatgaccccatcccagatgacaaacagaaaggtctagtgatattagggggtggagggtaagggagaatggggtgcacactcctcataggctccaaccctgggtcagtgttagcgtcttttcctcagacctcactatggggcagctcttccctcaacgactggaaagtggggtccccagggagcatactctagccagatttaactctgcacagcaatggttccccagggcactgccttttctgagtcccacttcctttcccaggctctgacaaatgctgccaggcgcccatgaaccaggctgttaaccaagatctgaccagcaaagacttcagcaatgaagagactgagcatttgtctccaatccgggatcggctgaacttggcccaaagctctgtccggctgaggcctccttggtctgcccttaattaaagctcctattgtcctacttttgggttcacttcagtgatctggccaagcaggcccagctctttggcgccgttaggggcgggttttccatcctctccgccgcctacaactcattagctccccaattcaaagcttcccctacttcgagaagcaggctgcacctaggatggagatactcctgtcccctgatcctccgggggaactcctctctgaagcgagatgagatgctgaaggaagctgggagaggggagccggggcctgcgagaacctcaggcggcaggaggccatgcaggcgactgtactgcgagagctgcgcacacggccacaccctgtggtgactcaccaggagggaacgcccgtttttttttttttttttttaagttttgatcgcggccgccaggaggagccctgagaccctaaaggaaaaaaccgttcgtacaggagccctgtgccggtggccgaaaggcacagtgtgcttgtgcaaatgcacccaacctctcttaagcttcctttttttctgagctaattaaaaacttctgagctaactagaaacttctggtccagaacaaagctgggcatgttttgtccggcaagtcccagatggagtagggatcctgcaaaaccagctccttcccaaccagcacgtgtccacaaacgggacctcagccctgggtgcgccctgctgccgggtgactcacagatgctgcagggtgaggctacatccaagcatccattcatcagaaacactgccacaccccaggggacctctacctacctcctttcccatttctaggcctttatgcatttattgtcgacaccttctcctaagtggtacataaaaaggtttgtcactcacatgaagaagggcctaggcctggcccaggatgatgtggtagactttggggaaccccttttgagggccttaccctgcctggggagtggaggggggatggctaggggcaggtagaatgttgggggggaggggagggagagggagaagggattgacatctgaagcaagcttgttcctaatttgaactaataaaataaaataaaaattaaaaaaaaaaaaggtttgtcacttcagtccaaaaataaggaccactcctttcccagttcttcggagactaagaaaaagcaagctggctccaggttgcccctcatgagcttccttttgccttttccatcctcacccagggttgcacccatacttggatccatatggctgactgttcccccaaagaaggcctcccccagagtgcaaaataagccgttccctccagctcaaagggatacctcgagctatctgagggtttctagcatctcccaaagacctcatctacagaggctgggtcaggagacagtgggagccacactacgaagctgatagggctggatcttcgatgccccattgtctttctgctgttcatccttgcccggtgtaactctggtataagtctcagaaggctcacatgcctgcttcttacctgttctgctttaggcatggatttggggtcagctcttgctaggaggggagaggtcaaacctgtgggaccagaggtgatctctctctctctctctctctctctctctctctctctctctctctgtttttcgagacagggtttttctatgtagccctgtcctggaactcactctgtagaccaggtttggcctcaaactcagagatccacttgcctctgcctcctgagtgctgggattaaagacaagtgccatgatttaaaaaaaaaaggggggggacaaggaaagaaatgatccctcctttcttatggaatagtccctagaactgtggtgggcacttgccacaccaggacacacaaagggaaggctacctcactgatcaggacagcagaagtggaaccccctgtgctgtctggagtcctttatccaatccccaacctcagccaattcagcagcagccactgctctggctgaagacacatttctgaattaggctttctgttccaatagattctgttgaatagaaatctatctccccccaaacactccaacgccatgcactagccacccagctgtctctcaggcattcccttcctctctatctcggccacatgccttcccctttagttcctttaaggagccatgtccccacactatgctttttgtgtctgcaatgcacaaaaatgcaatgcattaactacccttgcctagcagcacctgcctcttccttggctcttcttgtctcagtttgtcagagcatacacacacacacacacacacacacacacacacagagagagagagagagagagagagagagagagagagagagagagagagaggcatgcacacacatacacagcaatgtgagtacaggtgcctgaggaagccagaggcatcagatccccctggagctggagttaggtgatcatgaggagatagatgacacaggttctgggacctgaactcatgtcctttgcaagaactttactcatccttaaccactctgcagctgaagtctgtttatttatttatttatttacttatttatttatgtgcttatttagctattttgagacaggatctcactctgtagcccagactggtgttaaactcttaagcttcagcctccccagtactgggttacaagtagctggcagcctcctagtcttgattccctttagatgcaaacaggcaagagcagaatttcctacttcccagtccctcttccttccctttctcccttgtagctctctcctttcttctttgtgaaaacatgcagcatttacattccattgcccaaccctgagccacgcctttgtttttgacttagatttacagatgaagatagtacaagcttcccatcagtcctacggctgaagtattttctgctgtctcttgattggttgacatgattcctccagaagtgttttcaagcctgagcactgataagatatctgggatctgagtcgacaatttttataactgggtaaagggtccataaagatttataatattccagtatgcatggcatttcctatttttaaagatgttaaaataacaattaaaaagggaagatgggggtgtagagagacaggtctgcagttagagcacttgctgctcttgtagacaagctgggttcagttcccagcacccacatggtggctcacagtcatatgcaactccattcccaggggatctgatatatatgtatatacatatacatgtggattcatgtaacacagaaaataaaagaacccagagactgatattggggttcaaacttcaagctgaagaacagaaaagcaaagtagtgggtcaccagctcttaccactacctcaggctgaatgggatgatcctgctgcctctcctcagcatggctggataatgaatgcctcctactgaatactgaagaccctgcttctatcttttatacccctctagtgctgggattcaaggtgtgtgatctgttattcctttatattgattcaatctcaggtgtctctgagtggccttggacttacagtgatccatctacctcttaatcctgagtcctaggattaaaggtgtgtgccaccaccttctagtttctggctgctgagattaaaggtgtgagcctggcttctatggcttgtgcacgtgcagaggcagaagtgtgtcctctagtaaccttttagggagaattccctatttatcattttctgatgaggtctaattgggttgcatataattaaaatcagatgcattatgggatgggacaagttcagtaagaaaaatgaatatatggcttaatctatcaattaaagtagaaactatacccttgtaaccagtccctcctcttgaaccccataaaaggaagccccaaacaatgagtggtttcatttgtacagcacaacatcaatttggacagtatatctctctttaatctataccatcactttgctcacatacaatgatcttgcttcatttgcaaatctgggaacatgacccagactgggactaccaggagtattagctattaataatgttgattttgtcaagtacgtattccagtaagcctcgttttgatctaaacacctgcaaagaccaggttaaaaccaaaatagagccatgtggtagtggcacatacctttaataccagcactcagggaacagaggcaggtggatctctatgagttcaaggccagtctggtctatagagtaagttccagaatagccaaggctacacagagaaaccctgtctcaaaaaataaaataaaacaaacaaacaaacaaaaaccaaaaaacaaaatgtagggccaggaggtggtggcacatgcctttaatcccagcacttgggcagtcagaggcaggaagcaagagggaggataatctctgtgagctcaaggacagcctggtccacatagtgagttccaggacagccagagctgtgtagagagaccctgtctcaagagacaaaaacaaacaaacaaacaaaaaatcaaaatggtgtcactcaagctgaagttcagagcgtcaccaagacaacactcatctgtttctgttcctcccagatgtctggaatagaacagacttaccaaacaggccagtttcaatcggcaattctctaccttaatccttccacaaagaggcaaccgaaataagattcggttcactaattattacatggtgtaatctggttgtctggttggttcaagattttttgtttggttggtttttactttttgaaacagggacttctgtgttccgggctggcctcgaacttgttatatagttgaggatgtccttgaatatctaatcatcttacctatacctgagtgctgagattagaggtatgtgccaccatatctggtttatgttgtgctggaaattgaactcaaggcattatgcatgctaggcaagtactctcccaactgaatcacatctccagcttagatttgcccttttattcagtgtgcttttctcttagcataatgtcaagttccatgttaccacaaatggcagtgtcttctattcaagcttcttttccaagtcttggctactgtgactaaccctgaagtgagcactggagtgcaggtatttatttctttgaggttctgctttcatttcctttgggtctgtgaccagaagaaggcatgctgggtcacataggccttctttctgttttcagcatttcacaatagtggcaccaactgccattctcaagaatgcccaaggtctgctttcttcatatcttcatctatacttcttgtcacttgtcttctgttgggttttagtggtattgtgtgttagggtgtaggatggggcagggtgtgataatgacgtcctctctgtctctctctgtctctctctctctctctctctcacacacacacacacacacacacacagagagagagagagagagagagagagagagagagagagagagagagagagagagagagagtaaacaagcaagtgactaaaaacaatgcatttcaggataggtgcaatggctcatgcctgtagtccattgctcctggaaagctgaggtacagagatcatctagccttggagtttgaagccagcctgggctgcgtcacgagactctgtctaaaaattgcttttattgttaagcagacaaaactgaaatgtaaaagtgcatatgttatgcttgttagatgtgctgtaagaaaccaaacaagtctgtcttgttatttcagagactgaggacattggtggcctacagggggcagtagagaggaaggaaagaagcagaaagatggaaggaaaaccagagcaaggtagcagaggtaaggagacaatctttccctatcccgtgtgtgtgtgtgtgtgtgtgtgtgtgtgtgtgtgtgtgtgtgtgtgtgtgtgtgtgtgtgtttgtgtgtgtgtgtgtgtacgtgcgcacgccacacgtgtttgtgcgtgtctgtgtgtctgtctgtctgtctccatctgtctctgtatctctctgatagctcttgattaatggaacctatattatgaggtaaaatagtaaaaacaaatttgaatgttgggggatgagaacccaaaatggaacagaaatgttaacaaatgaacctaattctattaaaatgcaaatagcttccaggaatggtggcacttgcttgtaatcctagcacccaggaggctgtgacagatgatcatgtgtttgaggtcagcctgggctacatggtgagttcagtgccaaactgagatgtattgaaagatcttgtccccaaaaacaaaggctaaagagcatggccttgtcttgggaggaaaacattcacttgttgagaagaagggcttagttggagggaagggcatgaggagaatgatatttatctgtgaaaaatgtaaagtttaaaaatccataatttcatccgggcagcacatgcctttaatcccagcacttgggaggcagaggcaagcagatctctgtgagttcgaggccagcctggtctacaaagtgggttctaggacagtctccaaagctaaagagaaaccctgtctcaaaaaaaaaaaaatccatgaccttactgggtgtggttgcatatgttttattcccaggatttgggaagctgaggcaggaggatcaggagttcaaggcatcctcagtttgccgatgtcagtagatccacttcttcagggttccttaggggcacagttacctggaccagtggcagaggagtaaaacccattgtctgaagtaagtagctgtgagtccacagtgacatacacaagtaagtagcagtgacatacacaagtaagtagctgtgagtccatagtgccatacacaagtaagtatttgtgagtgcacagtgacatacaaagtcagggattaaataaacatgggaaggaacagccttacagtagagtcccaattagtcagtgtggaaaggagagggcaatggtgggtagcaccaggcaaagcacagaaacagttactgtaagaaactgggagctgtcagataattttctcttttattctattttaatatttttgagttatttatttttattttatatgtaggagtattttgctggcatgaatgtataggtaccacatgcttgcattgcctgtggaggccagaagagggcatcaaattccctggaaccagagctacagactgttgtgagccaccatgcgggtgctgggaaccaaacctgggtccttagaaagaacagcaagtgcttttagctactgagccatctctccaaccccagttttcttaaaaatatttggaagtccagacatagtggtgcacacctttaatcccagtactgagaaggcagagtagggaaggtctctgtgagttcagggccagtctaattaacttatggagctccaggatagccagaaccacatagagagtacttagttcagaaaacaaaagcaccccctctacacacacacacatctggggctggagaggtggctcagcagttaaagcacttattgctgttgttcttgcagaggacccaggttcagttcccagcacccacatgacagctcataacagcctgtaactccagcttcagtggatctgatgccctcttctgacctctgtgagctcctacacatgttgtatatatacacactcaggcacacacagagatacatataaaataagtacataattttaaaattcattattactgtgtctgttgcatgtgcacacattttcgggtctgaggacaactttgtggaggtgactcttcccatccaccttctggggtttgaactcaggtctccaggtcaccaggcttccatggcaaggacctttacccaataagccatcttgctagcacagataattttcagaaaggacccagaaaggaaattctgccttatgctgctttatgggacatccttgaagacattatactacgtgagataaaccagctacaatggtgtttccgatttcacagacaggcagtgtgtaaagcaagcagacacatagaacaggtgtactatgctgcttgtctgagactaggaggaagggatgaccagagatgttttcactttgcaggctgagaaggttctggagacaggttacatggcaaagtgaagctacgtgactctactcggtgcacacctgccaatcgttaagatagcaaagtttgcagggaggaggtggtggtgcacgcctttactcttagcatttgggaggtaaaggtaggaatggatctctttgagtttgaggccagcctggtctatagaattccaggatggccagggatacatagagaaacctatctcaaaacaaaaacaaacaaacaacccccccccaaaaacccaaaaaacaaaaaagagagagagaaagaaaaagcttatgttgtgtgaagtactgtggagtcctgtactggagaggatacatgtctaggtattttcctttttttgaggcagagtctcactcaaactttgtggcccaggatggcctggaaagccaagttttccatagctcctcctatgttagtctcttaagtgctgggatttcagatgtgagccaccatgcccagctcttcggtattcttaccaaatgcacacaaacctctctccaatcatggaaaatcaaacccagttcaaagaacactgatcaggaccagttaagagtgtcaaggtcacgacagagagagagagagagagagagagagagagagagagagagagagagagagagagagagacagagagacagagacacagagacacagagagacagagagacagagagagtgcacctagggaggtcatcccaagaaattacaggagtcaaaaaataacctccaaatgtagtgtgtgagcctagatggaattctggaaccacaaaaagacattagtggggaagctgggaagattccaataaagtcttatttatgtttagtaacatacaattaattatttattttatatctgtgtgtttgtgtgtgtgccatgtgtgctggagcccacagaggtaagaagagggaggaccttggatcttcagaaactgcagtcttactcagctgtgagcctctgtggggatgctaggaactgaacccaggtcctttacaagagcagtaagtactcttaactgctgagccatctatccagacccaagttgacccagtatttttgttttgttttattctgagatatgatctcacactgtagccaaggctagcctcaaactcactgtaatcctcctgcctcactttgctgaatgctgagattatagctgtgagtcccatgcctaactagcatgttcgattcagttcagttaactaatttaaattcatttaaaaaatcacgagttcaaggctatccttagctatgtagtgaattaaagaacagcttgggttctatgagaccctgtctcaaaagaaacggaaacaatcccagaaacaaaagtaaacaaactcaaatgaaaacaactgactatttaattaaatagctttaaatcatttagttaaatgaatatacttcgtttgtgaaattagtcctgtatgctgttccagcttcctggtcctgttcagtgagctgtggttgagggagatggggacatccaggaggcagaggaggaacataggagtataccagtgcactggaacatgctctgtcaggcagcaccctctgtgtttgttgtgtgggacctgagactctgtgctggaacatcccttgcagcagtattttggaggaggtgtggtaggggagagcccttcctttcccgaggtgttgccaaggcccttctgtctttcaaaatttagtcagcttcaggaagactgtactgccagcgttttcttaccacggcagcccccagggactctctgacgtttacacacctgggcttccatgggcatcatctctagtcctttcagcaaccgcttccatagaccttcatttgtttgttcccaggagtcctttctgctggagatgtgaggcggtgacagaggtcccccaaccctgctggtccctcccatccattactccactgctcggcttaccactcaggctcttctcagctcttttgactttgggtttccgaacccctcccatctcgcagttgtctgaaatggagcacgacaatgggctttatcttctctttctttcttttgttgttccagggctctaaagaggagagatgggcggtttaggcttaagcacagtttctggaaggatagcaggttttctgatatccctccatacccactctccatcagcttctccctggacagctctcctgggctcctggctgggagcctgactgggaccagtcagagggaagaccctgttggagtctggagaggagaggagaggtaactattcctccagctgcctttttgttgggcatagtttagaagtggccatacttctatgatgatggctgtagcttctataccttgactcttccacagtcatagctctggagacaggaaccttttcaagcccttctgagatatccagagagatgatagttgtcataattcctgatgattcgtgtcccaggatctcttactgttcagcttgtaaatggtccctgtctgtgagcatacacctaaatgtgctcactggcttccaccaggagtctggctgatctcctgggtatgtgtaggataacataacatgctgggcatagattcttttggtgaccccgcaagccaagtctctgagtctggatgaacaaggctccactatggtcaggagggctcagcatgtgcaggatttgtgggtacagtatctactactaactcagatctgtgagctgaagtgtgaggaagcagaggctgcatggacagctgttctttggatgtttgagacattcagacacgacgcagcctatgtgtttagctacccaatataaacactttaaaaagagcattggtgtttgctaagctggcaattggtactggaaaaatcagctttccttgacttgatgattcagctagcaggtcctttgccaaactgggtcgctgagcaaattctccttgcagaattagtttactcctgtcaaagccagattctccctgcccaaggaaggctggacttgtcctgctggctcagggtgggttggcctgggtgcctgtgttcaagggttgctcccctggagtgtcttccacaatggggaaatggagggcctaccccacctgagtcatctttaacttcacacaggcaggtaaagctgcctggtgacacagaccagaattcatccatggttagaatctttagccaagaggggatggatccagtctgaggagtctggaggagtacagagggctagtcgggacactcagggtggtttgggaggaaagggatccgatcacagctggagcttaacgacaatgagactggacccgggccaggtcagggaactaagttcatctttgggcagtttggcctctactggtccctctatgtttcctggccaggcatttggggtgtgcagttgggcaaagggcagtagtgtgacatcactggagtcaatggagtgctcacccagagacagtgtcctaaagagggcagggtctgtgggaagtggtgcctgacggtggcagcaggaggggggaggacaatgacacagcatcatcctggcctgtgtgggctgatggggaggggagagggaggggcagcatcctgggctgtgtgggctgactggtggtggggggtggactgggctgggtgggctgactcttgacaggggtctgttggttttggtgaacttcagagaagagaatcatgctgagaactaagctggggcctatggctgggttctggaagccattctaaagctagcagaggaatgacaagagaagactcttgtgagagtagggggtcacaggcacgctcaatggaaacagggcctttggtgagtccaaaagaatctccatgcattttgaagccccgtcctcaccagctgcacactctttccccaacctaacaccccaagaagaaaactctagaaagatagggtggattggatctgcttgagttccagggactattttcgtggtcttttccccacccatggggttatatacatacatatagacagacagacaaataggcatccttttgtataactagcaagaatcacacttgtgttctttttctttctttaaaaaaaaaaaggaaaaagaaaaagaaaaagtatctctgtgtgtgcacatttgtgtgtgtgaatgcaggcatgggtatgccacgacacctgggtggttagaggacaaccgaaggtagcagccctcaccttccaccttgtttgagacagtctctttgtaattttttcccactatgcacacctggctagctggcccacagcattctgagattctcctgtcgttgcctcctatttttctgtactagttctaggattatgggtgttcctggctttgtgtgggccctgggaatttgaactcaggtcctcttgcttacgcagcaagcgctttatccactgagtcattttcacagtcttctttttctttaaaagggctattccaagtgtctgtccacttctgccctaaggagatagcaataacatgtgtggggcttggtcatgtgactggaggtcctgttgcccacagcaccctttaactaccctaaccacagcccagggcctgccagcactgggcaggaatgtgagagggcctcagctctgatgggcatgggttatgagggccctgggtctggtaaacactaattaagttctgccacacccagcaggatggctttgaggggtgagagggaggaggccccagcctcctgacccaggtctagaccacatgagtgggcacactggaagaccttctgcccctgtccctaggccaatagagtccatatacctcagctctctagctctgaagggtctatcgcccagctgcccttgacctactgctgcagtgagaagggcctgctgccaagaggaccttccctagcacatccgtgatgatcaggagggaataggtatttgcaagagcttgcatgctttgtcccactgactttcagtgacacagccaggaaggcatacctgtcccattttatagatgaggaaactgaggctttgctttgattaagggaggcagcatgtggtatgtggcttgaggaatctgactatcctgagtaatgagagaggcagcctggccctgctgcctgtgacacatcaggaagttggagagctgctccagggggttattctagttagagaaggatctccccaagcagtgatgggtcttctgcccccttgtctaggatatggggaattacgtggctactgctaaactcacagaatgcccctagaagctggaccccaaggtagaaagtggcccagctggctgcccctgtcctgggtaacccaggggctaggatgagtgaaaatcagctgactgagccagggtgactatgcctctgaccaatgctgtgtcctccagagggtgaggcaacacttgttcagtagagaccacacatttgttcgctgggccatggtctttggcagcaggaaaggcagtatgcctatgccacttatgcctggcctcaggctgctttggctctaggctccaaaagcctgactaggccagtggggaccctaggtaggctggaggactcgccatcaggtaacatgccagtgctcaggcttagagagcttagatcccagccagggccggacagactattgttctgaagtgctaccatctcacagagtactcaagttccctgccatggggataaggcatgtccagagctgacctctcttgtctgccttctgtttgggtttctcagggctcctagtagagggcgtaggaggctcattgagagaagggtagtgcacagcactgggcaagccccacccaagctctcaactgactcattgctcagcctcctactggcctagtaagggcttggtgccctagagcctggcaggctgtcacaggcatgtataaaagcatgctaatccagtccgtggcactatacctgttgctgtccactgctgtacgatgctgggaggcttggggaagctggcggctgagggcctggcccaccgcactgagaaagccactgagggagcaggtgaggcccggggctttccactgtctagaagttgggaacagactcccttgggcttgttgaaagctgctatcagtaggcaggcaagagccttggggtagactgaggctgaggcccctcaggaagcttggctcactggtcccaccaggagatagtagaattgggggggacaaaggctggggtaattgctcagtgtagagccactgcccaagcagcctccctagtagggccttgctccatgacccaagctcagcctgctcggaggtcaggaggaggccagccctgaggagcccccaggaagaggcagagtccaggtgctggtggcttaggtccttctgcctggaagcctagcataccttttgtcaacattgcttattctagggcctgagggtgtagctcagtgatagaacatttgtctatacaaggccctggagttttgcaagaactataaaacaaaatgaaacaaaaatcctgcctgttttcattagtctatgtagaaaaaaggaagataggttttaattttcaccatacttcaaagtttcttttatttattgtgaaaccaaggaatctggtctgttcaaagtctaaaagggcatttctatttcttccaagaacctaggacattgttttgccagctgaggtccgtgcctaacaaatggcagttcatgtgattcccactgtgggacatagatgaaaatctgtgtcaagtttgctgttctctttggaaatggctgtagacatgtcagcacttacttcatttttaactccacagctggatctgacccccttttaatcttccagccttttgagcttgtgagggacatggcagtggaaggtggtgttaggaacacttctgtctctaaaaattttgggttctagaatgctcccatcaaaattctccagaacctgaaggtgggtagggactcactcttctgggaagagtcaccccaggagtttagcttctctggagatgtacagatgttgctgaagtaggccagtcagctcttcctgacaggtgtggctaactgataaacatgcctacctcgcctcaggtttccagctgtcagaaggctgttctagttatccatgcccttccaggctgaggggcatgggggaccctgtgcatatccagcagccaagcatcttgggggtctaccaagggaggcagctaggggttttcttaagctgtctcccccgactaggggcagcacaccagagtctctccttcttgtctagaggcaccttggccattgtgaggggaagtgggcttacatacagcttcactctcaatttgtcctctctctgcagttcacgcagtggaggaggtggtgaaggaagtggtggaccacgccaaggaggttggagagaagggtaaggctgatttgtttgaagataggagtggggaggagggaaaggaaggagaaaagggggcaaggaaagaagggcagaggggtggtgtacttacctaacctgtgtaaagtggttgcatccccagcatacaaacggaagtagagagagaataaagtaagcaggcgggaagctagagagggaggaagggagcccaagtgccagggctaatccttttcttgctcaaccagacccagccctgccccagatgtagcatcctctctgctgggctgcaattatctgtacatcctccccataggcaattatctgtccaagttgtaccttgtgttagggctccatctaggctgttttctctgtggaatgttaagaagacaaggccacaaaaagtgacgtggcagcacacggggacacaacacttaaaatagacatctgtatattttaatatgtatttgtatacacatttattgtgtatgtgttatgccttgagtagagcagtgtacaaaacatatctcactccaatctctacaatgaagtagggtccagctgggtgaaggacttacatttaaatacacaaatatgttaaactgcttaagctcaaacagctaaaatgaaatgccataaatttaatggtttgtaaacagcagaaatttgtttctatagccaagcatggtggatcatgtctattatcctagaactagggagaatgaggcagaaaaattgtgagtttgaggctagaccacccggggttacacagtgagtgccagcccagcctgaactatgcagtgagatcctcattcaaaagaagagaaaagaaggaaaagaaaagaaggaaatgtgttgctcttgctgctgaagtctggccacctggtgaagctggctcctggctcacatgcggtgacgactctctgctacgctctcacaaggctgaaggattagtttgttctcctgggtgttacccttcctgctcaggaggctccttccatcctgctaacctacaccacagctcttaccttttcatggcacgatcttgaggaggcttacaacaaggaattttggggacacaaaaattcagaccaaataagtgtcacaagagacttcagtataatcttggggaggctctttttttttttttttttttttttttttttttttttttttttttttttttttttttttttttttttttttttttttttttttttgaggcaggatctctttgtgtagctctggctgtcctcgaactcacagagatcaacctgcttctgcctccctgagtgctgggattaaaggtgtgtgtccctgctgctgctgacgatactgcccagcacgaggggaggctttttaaaaacaacaacaacaataaaacaacacagtagccataaagaaaatgttaggtacatttgtcaatatgacacttcacaattgcacataggagaagaaagaggaggggacacaaaaagcaaagcaaaatggaagttaagtcaaaaggaaggccacagatttctgtgataagatgttcatgacagaaacagtaatccaatatagcaatcatcacaaaattgaacaaagaatacaaagaagcagtttccagaaaaatagtgtaagtagccagcatacccttgagctgtttgtgttgtctcactcaaatttgagaaaacgaaagttgtcggggaaaaatcaaagcaaattggattcatggtgacagtggcacactgcccttttgtccctctagagctgctccaggcctgatccctaagatggcctcacccctcaggcctctcctgctagaagcaggaggtcactcactcctacaatttccttctttttccaatagcccttaccgatgccctaaagaaagcccaagaatcaggggacagagtggtgaaggaggtgaccgagaaggtgacccacaccgtcactgatgctgttacccatgctgcagaaggcctgggtagactgggacagtgagcctgcctaccaccatcctggcctttcctgaatgtcaataaaaagcctgcaatgtgaacagagtcctgcattactcctgtttggatggaaaccctaggcaaagtgcctttttgatgttctttgttgtttattttggacacaggccttatttgtaccaggttggcctgaattcacttttgctgtgtagctgaggctgaccttgaactcctgatctttttgccttcacctcctgagtgtgggatcacaggtaaaggccacaaagcctgaggggggctaaatctttgttttcgtggaaacactgtatactgtcagcttctcctctgccttagaggagcatccaacatgatgggtacctgccacctaatgaatcagatgaggaattatcattccagcaagcagtcctcgcgtgtgtgtgtgtgtgtgtgtgtgtgtgtgtgtgtgtgtgtgtgtgtgtgtgtgtgtgtgtgtgtgtgtgtgtgttttcagacagggtctctcaatggcctgcaactagtccagtagactaggctggccagaaagccccagggatttgtctgtctccacctcggcagcactgggaatgtgtgccacaatagctgttttaattttttattttaaatgtgtgttctgacgatggagtatgattgcacagcaaggccttatctagggagtcctcacaccttgaactcttagccctctcccacccttctctttcttttcttcccttttttgtcaagtgaacccacagcttagctagcacttcgcctgttctctaccactgagctccacccccagcctctgctgcgcgtgtgtacaggtgtgcaggcactcaaaagggacagcacacattctctgtagcattctttggttctccttgtaatgggagatcaggatctaccaggactcagagcacagcttggctgctcatcctgagacccagataagcatttactctgagggtacagaagctagttatagaggaagaaacccactgtttgtttctggaggctcctggtggactccacttgggagacatgtggccaagacataggtagtgggtggcagtggccctgcttccttcctcttatgagcaatcagcacctcacagttcaatatgtgtgagggactggatgtgctggcacatccctgtaatctcagcactcggcatcagagacaggagggtcaggagttcaagatcaagcctcagctatacagtgagtttgaggccagcctaggctacctaagaaccggtctataaagattgtgcaagtagatagcatttagaagttttggaacagaagtcaggtgtaaatatattatggctaagtaagttaataagtaagtaagtaagtttacatgctttaaattccagcatttaggaggtagacaaagggggctgaattcaaagccagcctgagctacataaaccccagaaaaaaacaaaacaaaacaaaacaaacaaaaaaaaccccaaaccaaaagatatacaaaatgggctggggacaaagtggaccaagtgcttgctggacaagtttgaggacctgattttgagcccccagcatccatgttaaactcctaggtatatatgggagcagagatgggtggatcttgggatcttgcttgccagccaatcaagctgaataaaacaatgagctccaggttcaatgagagaccctgcctcaaaaatcagtgtgaagaatggtggaagaaggtacccaacatcaacctctgcccatgtgtgtatgggttagtgtacctgcacatccatgtgcaacatgcatttaccacacacacacccatacacatgcatgcacattttttgagagcatagataagagaaattctgtgtaaaactatgattttttttcaagatagggtttctctgtttagccctgcctgtactgaaactcgtgctatatatagaccaggctggccttgaaatcatagaaatccgtctacccctgccatcggactgctgggattaaaggcttgggtcaccatgcctggctctaaatttttattaatcttgctggaagctatttgctcttagcagaaataaagagaaaaggtgtttcggtcaaagaataaatcagtttcttgccgtgctttggctcttctggaaatgtctcacagatttctaaaaggtacaagctatccaaaggtcagcaatggacaatggaatggacattgtcttgctcgtgctgggcttcttctcttggtttggctcctgaagacttctgaatgtctccagtccaaacccaagcttatagacccaaggacagtatgagtggcagacatggattggaatggtctccttgggtgtgtaaaggtgccaagtgggaaatgcacacttactataacatgtgaatggcaccaagaacatgatagcaagatggaaacatccggaaatcaccagacatcactcaggtggcaaattgtgctgtttatgaggcttgccacacaatatggagatggtacctataagttccactggactgtaagttgctaagtctggaaatgggatctgtgcctggaagtttactaaccatcttaggctaacaaatactgcctatagaggaagtggattgcacatggctactgaggaggaggggctggggatgtagcccagggacagagcgcttgcctaagacatgcaagatccatgcccaggcctggaaaaacaaaacaaaacaaaacaaaaacaaaacccaaaaaatcaaggggaatgtaaatatactatggccaagcaagttaataagttgcaaaatatatatgcagaacaagttcatttttcataaggcaaatgatataattatataaagaacagtataaaaactagacagctcatacctggcaaaaatattagcagtggtcctctctgtctgtgggaatatgagaaattcttactttggcactgcatttctcggatgtttaagaggaaaccaatacagttgtcttaaaaattctgttgtggagggcaacactagcttattcaggattgctccctagtgaagtgccactgagagtttgttactactcgggaagagtgaagaggcagcattgggaagcagagaaccatggctttgtggatgtccagggtggactcagtgaatgttttttgcttaataggttatggagaccagcttgtactgctgaacgtgcatagcagctatgtgaactagtccacatgccacgagttaagataaacaatgaaactgttctttcttaggctggtgagatggctcagtggataaaatgcttgctgagtaagcttgatggcttgaattcaatccctgggacccacataaaagcacagtgataaaaccagctccgcaaagttgtcttctgacctctgcatgcacacatgccatggcatgggcatgcctctaccccacaataacaataaaatatttaaaaaggtcctatttccaaaaagagtcaaagtactggtctcgaactcacagagatccaccttccctacctcctgagtgtttttttttttttttctgcctacatcttactccacctcccacactgctgtttcctagaacaagtatgtcttccatatttcattttcttctaagtgtacttggcaatgaagggcatgacatcagtgtcatcaaaataatagtgtcagagccagaagttggtggtgcatgcctttatttccagcactttggtaggtagaggcaggtggatctctgtgagttcgaggccagcctggtctgcagagggagctttggagacaggctccaaagcaatacagagaaaccctgtcttggaaaaacaaacaaacaaaataaacaaagtttcaggaaaaaaaatgatgtggtgtagtgttttcagcttgtcttattcttggatcattctctaccctccctggtttcaccagtctagaaaactaatggcctgttagtgaaaatctacagtcctgaaattctagcatagagatttaaattaggattgccaaaagttcaaggccagcctgggatgtaagagttaacaccctgtcacaaaaaggctcaacagcctggaagcccctggaaagacaaaatacagttggaattctttctttcaagacctcatttagctgggtatggtgacacacagcttaaatttcaacactcaggatggagaggcaagaggatcatgagtttgtggccagcctgagctatgtagggaaaccctatctcaaaaaaacaaaaacaaacaaaaatcaaaaaaaaagacccccaaacccccaaaaccaagggctggtggtgtagcttaatggtagaactcttgctagcatgtgctagccctgagttccatttagatcacaaacagcaaacaagcagatccttaaactgtagagacttgtcatcatttgagctggccgctagtccctggaacacccactgccaagctgtctttatttctcctgactgctcagttacattaagtcttttcactaggggcagttgccaaaaacactcagacatcatcatttaagttggtggctgctagcagtttgagcaaacagcaggataagaagcttttatggcaaaactggtaagggtgaggtctgcagggactgacactccaacttatttctgggatgtggagataccttgtgcacatgctaaggacaaaggtctcacctcagacctaccttgtagaggcactgcctaaccgatggttgaataggatccccaacctgcacacagaactccttggcaaagatgaaatcttgctagttctagatgggaaggaatctgccgaatcactgaccactaaagccaagtgagtggagacttcagtggccacatataacagactttggaattagttcagaaaggccactcaacaagggtatggagggggagtgcagtctccctgagttggcctctggtctctagacctccccccccccccccccgatatatcagcatccctgaagatgtgtgtgtggggtgcagttcagatcatcttattctaattcctaacttctccaccataagcaagagtagggtcaacatgccctaagaaggaagggctgggagcctcagcagccatctgcctggtatggattgagagggagtcactctatgctcattcttcacaattcacagcacccacaatgactagcaaaggtgtgcttaattataccctgaggatacccaagtgcactgttaccaccactggcatggcttggaaacacccaggggtttcttgtacccttgcaattggctacagaggcagaaataaagctgtgtatggaaatcaaaaacacctctggcacttctacagaacagaaactggttagcatagccttttctctctttttcctacatttatacttacagatagaacccatttgatcatttataagcacctgaaagtagatgttatataaatatacacacttacataaacactaccagtgggtagtcaaactatggcacagctgaagatgactctgaactcctaacccttctgtctcaaagcctccctagtgctgggactgtgtgtgctagcagtctgtttatgtggtgcagaggaccgaatctatactccctagcatctgaactacactgctagccctcatttaatatattctttccagtatctttttctctttcagaaaaggctatggtggcttcaacaggctgtgtagctaaagatgaccttgacctcctgtccccaccacccatgtactggaattagaccttcatttttgagtgtataaaatgggcatcattatagcttttcacctaccatttgctcatatttgagtgctgtgcccttccttgttctgcttctcctgtttcccatctttggcctcacatatgtattaacttaatcaactaaaggtatgtgcccacacccagcttagaaaactgacactatttacctttccctttgtcctatattgctcccacttctttcatgtcatgcacgcacggacgcatggacgcacggacgcatgcacgcacacatgcaggcatgcacttaagatatggcttagcacttaaaaaagtgctcaaaatcattggccatcagagaaatgcaactcaaaacaactctgagataccatctcacgcctgtcagaatggctaaaataaaaaacaccaatgacaatctatgctggagaggatgtggagaaaaaggaacactcctccattgctggtgggagtgtgatcttgtaagaccactctggaaatcagtatggcggttgctcagaaaaatgggaatcagtctacctcaagatccagccattcctctcttgggtatatacccaaatagggcatgtacttacaacaaggacatatgttcaaccatgttcatagcagcattgtttgtaatagccagaacctggaaacaacctagatgcccctnnnnnnnnnnnnnnnnnnnnnnnnnnnnnnnnnnnnnnnnnnnnnnnnnnnnnnnnnnnnnnnnnnnnnnnnnnnnnnnnnnnnnnnnnnnnnnnnnnnnagaagggactttgagagcccatcccatatgaagggttacactctggccctggacacatggggaagggcccaggatcagcataggaagacttggtggactttgctgagctcccgttgagggccctaccctgcctggggaatagtgggtggatggggttgggggggtgggctgggggtgggggagaaagtttgggggtgaggggagggagagggagaagggacttgaaataagcttgttccctaactagaactaataaaataaaataaaattaaaaaaaaaaaaaagatatggcttagatgttaaaagcacttgttgcttttgtagaggacctggggtttggttcataacacccacatggcagctaataactaattgaaacttcagtttctagggatacaaaacactaatacataaaataaaaagtataaatcctagcctggagagatggtccagaggctaagaaccctggttctgttttcagaacccacatggtgggctacaaccttctgtgacttgagcttcagggaatctgctgtgttcttctggcttccacaggcactgaagacagacactcatgcaggcaaaacacccatacacataaaaattaaagaaaataaattaaaaaaatcttaaaaaccaaaactcctagaatctgaatatgataacatgtctgaatggcttacttcacttactgtgataatccactgtttcatccaccttcctgcaaaagccacaaattcattcttcatggcttaaaaaaatatttaattgggtatatgccatagtgtttcatccattcattcactgatgtgcatctaaactggttccatcatggctatagatgtacagatatctctgtagtgtgttaatgtagaccaggctggcctcgtctcacagagatctgcttgccttgtaccaccactacccagccccatattatcataagtagctgctaaattcggtagctaaactgtttcaaataaaactttatttaaaagacaatagaaaaagacaggtatgatggcagcactctggagcaataggcaggaagatcgggatgagttcaaagttagccccaactaataggtttgaggtcaacctggactacataagaccctgtttcaaacaaatgaataaagtgtaacagaaattacaccagcatattagttttacacactgcagcctcttcccaaagaacagctattacagcttaataaaatgaaataaaaaataatccaggaataaaatttgagcagctagttgggtggtggtggtggtgcacacctttaatcctagcacttgagaggcaaaggtaggtggatctctatgagttcagggctagcctggtctacaaagagagttccagaatagtcagtgctatacagagaaactctatcttaaaaaaccagaaaccaaaccaaaacaaaaaagttgagcagctcataacaaaagaagtgacataggaagttatgaaaatttttgaacctcaattactgttttatcatttactaagagactataaaatatgaaaacacagaaaagaaacaatctttggaaaaggtagacttttaataactgcttttatcaccaagttaatcatgcagttacaaagtagttagaaatttctgaaaggatattgttaaaaaaaaaaagcactcattctcatataaataatatctggtacttctgtggaacactcctgttcaaaagccctggccaatgactccccaaacaaaagtcaactccaggcagtcaccagcctgctgttagtgaagcggtatgcagaatgcaaagcctcagaagaaggggcatacagtcaattgagggccactggctgtgcttggagccagccagactccaaacagggagcccaaaggtttttttctgggacactatttgaattatggttcaattactcaacacaatagatcttcagatgggaggaacaagtcattttcatggtaaataggttattgctctccctggactgtgctacaaattccccagagtccctgtcacttgcaggtatgaggagagtgcttccatagtgccactttgtttttcctggacagcaatgcagtgccaataagctatataaatgattctgttttatgctgtaaaaaactagcttcttccattgattatgtttttaggcattcactgcttgagtcaaggttaggcttaagtgattaaaggcaattttattacagcagcatgtactaattttattctgaaagaataaaatacataagagaaatagcttttatttttgtttgcaacttagaaaactgagttattttgtagatgtaaaatagcaataactcatttaaggaccatgccacctttggaaaatgccacacacctattcttttatgtgtccaagttcccagacttgtccagaagtggctgagtgctcttgactgccttccctggcaacagcactgaccctgttgggaagggcctagaacaaggcagcacagccaggaggcaggcagggactttatgtagaaaaagtacctaaccggctttctgatacacgtgattcctacttttacacatcagcttgtacatgatcctctaacctaatctctcttaaggggctgattcagactgacttgctgagaacagtgtccattagctaatgagtcacaagaacagatttctgtggttacatgtaaacttgtgacaggtctgcagaagttataggtgaagtgggtggtaaagaagttagtggtgacctgtctatgtgaaggtcacgccagcttcgttgtacaccttgaagactttctcaatggcattgacataggcagctgttcttaggtccaatcccaggttatacttcatggctgtgcgcataatttgctggaatgaaggagagaaggcagtgagaccacctgactgcatagcagcctaggaacacaaattgtcacccaccccatgaccaagtaaatataataagccttagacagctgaaggcaaatgactgcagcagcagaaatgtttctagcaggagcgacaaattctcggctgttattgtccagggaacagcaagaaattgttccgaagaactacagatgtgaatggtttctctgcctgttaactatcctggagctgagatcatatacttagtgactgtttaaattaaccaagaacagggcattgggaacattctagaatttcaatgatgatagctagacaaccttgtaaatatactgcaggccaatgatttattttgtgtatgtatatgctatgtgtgtgtgatgttcatgtgctaatctgcatgtgggtgtcatgtaaatccatgtgagacccaaggattgaacttagattattagacttgtggcaagagcctttatccatggagccatcttgcaagcccattatagtgttttaattatatctcaattaaaaaaaaaagcaagccgggcattagtggcacacgcctttaatcccagcacttgggaggcagaggcagaggcaggtggatctctgtgagttcgagaccagcctggtctccagagtgagtgccaggataggctccaaagctacacagagaaaccctgtctcgaaaaacaaaaacaacaaacaaacaaacaaacaaaaaagcagcaaaaatcaagcaccaactttccaagtattgaattagtggcacatgcccctaatcccagcactaggtaggaagagggatggctcaaccacagcctcacttatacagtgagttcaaggccagtctaggacacacgagaccctgttttaaacatgtgctgccttcttcagcagaatgtctattctgcttcagcctggaaatccaaatggacagactttggtcaagaagaaacaagcctttcatcccagtacttaggagggaggcagaaacaggcagacctatttgtgctcaaggccagcctggtctacatcagagagttccaggataagccagtgctacatgggtgaccctgtctcaaaagacaagcaaaaaccgaagtcagaaaaattgtattcaaactgtgtttgttacatttaaggccctggtgtaaaaagggctcaagtggttaaaaaaaaaaaagtcaaaaatttcttacttaaaccaaattttatagtaagtcagcttttgggctattacatagtgatctagtttggccaactacctttttggtaacagtcaactgcctaactcagcatgatttcttcctaaagatgtactgacaatagcgattatcaactgaggataaaacggtacatgttctgctgtgcatagtggggaccaagtaactgtatcacaaaacaatctggttatctgtatatcacgctattaacacaaaagcagctatcatctgcatacataccctggcagatctctccatggtgtaggccaagccagagtgcacaatgtctttctcagaggcaccctgtgaggaaaaagaacattaacttaacacatcacaaaatgcttcatgtctctagaataccaaggattaagttgatattgcagcactacaggaaagacatataatttctgtactctactagtgtttactagaaaagctagacaaatcacgttttccaacacagtttagttttaatggtatcgggcagcaacaaaaatgcatgaaataagatcatgattaaaacaaacacagaaaagaagcccaagaacaggcaagtagtcagattagcatcctccactcaaggtattctgcatagctgctgtcccggcatactctccaccctccaagtgagcaggactaccagacacagagggacatagccaaggcagacagcagctcagggaagatccgctgtgtacttagtagcccagtgctgaagaatctaagagctttctgtttctatatactcttctatctaatttgtttcttggaaggatttctttaaaaaattaagtgtagcgccaggcgtggtggcatatgcctttaatcccagcacttgggaggcagaggtaggtggatttatgtgagtttgaggacagcctgttctcagagcaagttctaggacagccaaggaaggctatacagataaaccttgtctcaaaaaacaaacaaaaaggtttaagtcattacaactcccaatgtgacacaagacagctctataatatatatcctaaagtgctagattaaaaacttgaagtgggttaccaaaaaaagtgatctggccagacatgcggtacatgtctgtgactccaaaacttgggaggtggagggaggaggctcaggagttcaagctcatccttggcaattcacatttgtattatattttgttttgggagatgaaacaaacttgcttaataggcagaatagtgcagtttcttttactcatccatcaaacatttactgagtaaaaagttctatgtcctaggcatgttcaggcattagggacacagcaatgaacaaaataatcaaaatcgagtgttttcacggagtctctctctctctgtgtacgtatgtatgtatgacacatatatatgctggctttaagttcatagaagccttcctagttctgcctcttgagttccagggctacagatacaagacaaatgaggcacagcacacttgcaaatcattatctggcaacaaatgcctctgaagaagataacaaccataaggcgctgcaaacagtcaacagcatcagtgtcctcttctcagttctcccttcccatcctcccctttcctctttttgctgtctgtggtactacagcactttataactcaaaggagttgcagctatctgcagtactggtggaatggtggaataaaggtatgacagttcagtgatagagcacttaactgatatacataaggtcctgggttcaattcccagtaccacaaaaatagaacaacataaaacagttacgttaaatatttttcccatgcatgtatgctatgcctttgtagcccatattttctgtaatatcctggtaagctctttgtaatgtgtaaacactattgatactcccttccaagaactgattgatttatcttttctaatctgttaactctgttatatgtgtccatataattatttcatattttcatataattcagtctcatgtttatttttcaattctagttttctgaagctttgagttaaagtatggtaagccttcatgattgtgttgaatcatcaagtacccaaaacagaattacttatttgccattatattaagaatggaatgacgaaataaaccatataataaaattatggttaacaacctttgataatactccatttaatctatctaccctgaaagccacgacagggagcatgtgtaaaattccagtctggtgtcaccacactcaccgatatcctgtcttggaactctgctgtagggaccacaggaatagttccaccatgctttccaaattttctctctaaactctcttgaacagacactgtaaaaagccaagacatcaagacaagacactattaatagagggagaaaataactgtagaacttaaagtaactctaacctatatatgtgtagccccaaaactaatgttttagaaatctttattcctaatgacatagaagggttaattattaaacactcagtaaggagaagtctgccaaattcctatagaaatgtgaatttaggtcacggctctgtttccataacacccaccacaagggttttctactcttggctctgttaaaaagaaattttgaggaagagaaaaggacagagaggaacattctcagagcggcagagcacaggaacacagttggaggtcttgcttttatttcagctggatgagaaattcttaagagctgagtttactctggtcaaataaaaactcttaccagaggactcaaaatggggtttccacactaggtaccacttcttttaattagtgtataaaagaatgggctttattataacattttcataaatgttagctaagatttttctgagagcaactagagatagggacaaattagatcagtgggagagttnnnnnnnnnnnnnnnnnnnnnnnnnnnnnnnnnnnnnnnnnnnnnnnnnnnnnnnnnnnnnnnnnnnnnnnnnnnnnnnnnnnnnnnnnnnnnnnnnnnntatatatatatatatatatatatatatatatatatatatatatatatatatatatatatatatatatccttttgctctatgaaccagaaggcagaaaaacagttttctgttcttaggcaaaggtctctaggcttatcagggaaaggtctcctaagtttgtatgcttttccagctttttctttggcccaaaggacaatttttggagacataaacaagattttaagaactcactgagcaagtggtaattagagtccctttcgtatttgaaggtcaatcggccatagctgacatgatttagattcttcagccactcaaagtaagacactgtcactcctccagcatttaagtagagatcctatacacaaaatgtgacatggaaaatataaaaaaattagtaaatgccaggcttggtgcttagtacctttagctgtttcaccatcttgttaggctcaggaactcaattttaataccaaggtggactaaacatctgtgctggctagttttatgccaacttgacacaagctaaaattatctgaggaggaaaactcaattaagaaaatgcttccataggacccatctgtatgcaagcccatagagcagtgtggttctcaaccttcctaatgtttcatgttggtgacttccaaccataaaactattttcgttgctacttcatacctgtaatttgttattgtttatgaactgtaatgtaaatatttttggagacagacttttgccaaaggggttgtaacccaaagattaagaactactactgtagacattttcttagtcagtgatgtgggagggcctagcccattgtgagtgaggccacctctgggttggtggtactgggttctataagaaataaggctgagcaagccagggggtccagcaagcagcacctctccatgtcctttgcatcagctcctgccttcaggatcctgccctgacttcctttgataatgaagagtgatgtggaagtgttgttttggtcattgtgtttcaccacaacaatagcaactctaactaagaggacaccaaacactgcaaacatatcttagagagcactgaatgacttggtgatagctagcttattcttaccatgatctcagactaaagtgctggtttaccaaccggtggactgacactgcctcaccagaagatagtattacctttgcaccatctcaaggcagcctatatcagttaagtgagtttttgttttgttttttccaagacacagtttctctttgtagctttggagcctgtcctggaactagcttttgtagaccaggttgctgttgaactcatagatccacctgcctctgcctcccaagtgcagggattaaaggcatgtgccaccactgtccctcaagttttttttttttttttttttttttttatttaaacacatgctttctacaaagtggctcttcagagtccatattaagtaccaataacctctctattttcatccctaactctgaatacaaggtcttctttgtagtagcagggaaaaaaatctgtatgtgtgggtatgtgagtgtctacagaggcagaagagtgtgtcagttccctggagctggggtataggcaggttgtgagccattcaatgatgaggctctgaacttgaaagagctctataggcttttaatgggtgtgccatctctttagtcctaatttttcctttcctttttcagtaaagcaggaagagacattcaaaatgtatagttaggaaatgggtaacaaaacttaagcatttaatttagaattatacttttagcatagtatacatttaacataactagattttgagggttacttatactcattacagctggagaaaatggtcaggactaagaaaaatgactggcatattatactaaccttgcttccaatcctcttcccacaccctccttatcatttgtttctcgaggtgctgcaaatcgaaccttgaacttcatgtgtgctcttgcaagggccctaccactgagatccaggcctcagccacattgccattatattttcttaaaagtaaagattaagaatttactacaacttgtgacaccagtgggtcctctctccttccagctgctaacaaaagaaatgatttccaggaacacaggtgccctaccggaataaccatgatgttcctttccaggaagatcttatcagcctctggagtggttggtccattggctccttcggcaatgatctgtaagagaatgggacatgcacagatgccaggaacactctcataggaaagagatgtatttatgtgtagggagctaaaaggaagaacatattttcagctaaaattaaattgctctacaaagtatatacaattttattttatttttctgtttctctaatttgttttcacaatggttttaccttggctttgactttgggtgcattggacttggtcaactgcttctcgctggctgcagggattaggatgtcacagtcagcctccaaaatgcttccttcatagacctttgctttggggaagcccagaattgatccatgttgctgcaattggttgaaaattataattaatggctacaacagagtttaaatgctatcttcagtacctattatacaaaatctatttattaagagctttgagttgaaaccagtctgggctacccagggaatgtaaggccaaccaaccatacatagcaagatcatgtcttaaaagtgaacaaaacaaaaaaaccaaaaacccaccaaacaggatgaggcaagatgatcaacctaagcttaaatacaaaaaaacccaaccccaccactcaaacataaaatcaaaagggagaagaaagaacactcaaggttcctgccaccaagcctgatgatgagatgagttcaaccacccaagacccatgtcgtggaaggagaaagaactcctgcaagctgccctctgacctccatgtgtgcatggtggcacatgccttacccccatcaccccccgaaaggcccccataactgaaaatgttgttattaatacttttttagggttggtgaaacagctcagtgcttgccatcaagaaatggtctgaacttgaatgctgggacccctatggtggaaggagagagcagacctccttcagggggtcttctgacctccaactgaatgccatagcacatgaacatgtaatagaagagaaacaaacaaacaaaaaacccaaaatctattctcttaaaaattgtgaagactacccagatatcagaataacataccaacttgaaatcttctagttcctttgggtcaataccgtctggattccatatgctcccatcagattcaccaacaccaacacatttagcaccaaaacgatgtaaatacctcatagagtgcaggcccacgttaccaaatccctgtggagaagaattatgcaagacagacttgatgcagatagtatgagtcaattttgaccaacagaaatctatactctggtagttgcatatgggaaagagaagtgatgtactgaatggcctcttcaatgacaagatcaagaatctgaaatccaaccttctgttacctatgagactgagacctagagaagttcagttagcaatataaagaagtggcagtggggacaagccacaccaatgcagttagagcctcctcgtcatcttatgactgtatatataacggtatactactattttaaggtgatgctaaacctaaacttttaagtgaaatacatgctgacacaggaagcctttgtaggtcaatgtgaaagtatttctgcacacttaaaatggctttacagttaaggccttttcccgttctgaatgccattttatgcttgaataaggacaaaagaagtgttctatgaatcaaatcaaggttaagaaaaaagatgctttagtctaaaaaccatcctaaaatctaacaaattctcaaagaatctaattttaatgccataattgaaaaacctttagaatttttaatgtgtattagttattaagaaaacaaaaactgggggctagtgagatggatgaatgggtaaaagcacacatgctcaatcctgaccacctgaatttaattcctggaatcatctgggtggaagtactgactcctgctctgacccccaatgtaccctgtagcgtgtgtcttcccacataaacaaacaaaatcaaacccccaaattactttacctgaacaacaaatgtcttatcaccaaaccctggtgtcattcctaaaatgctcatgtaagaagcttcattgatgaagttttcaattccatggaaaacaccacggccagtagcagagatgcgcccgtggatacctccttgactgattggtttaccagtaacacaggcatgtgcattgatatcctgtaagagagagccagagatatagctcacgagtaaagtgcttgtctagagtgggtgaggtctgaggtcaacccctgataacaagtaaataatgatgaagataataataatgataataatatcatcatcctttgggaggaaaggaatcccaatttaaaggaagaattatctcttttgagacaggtcactgaccttgaacttgtgatccttgtctcaatgttctgagtgctgggattataggcatgtgctaccatacatggtactaagtcctctttctatgatcaaaccaatataacaaagtatattctcattagctaaacatatttttagtaatagtgtgtgcaagttggtatcatggcactgcctgtaatcctagcatttgctgaggcaggagaagctcaagttcaagggcatcctgtttataaaaacacagactctacaagcttgtgcaaatctctgagtatgtgtgagtcatgtaaagttcatattcaccaacagggaggggccttttccaactttctgttcttaggaatctagtaaggtaggctatttttcacagaaagaaaacagtttaggaactgttgcgcacaaataacaatatcctaagtgtagctatgattcagcttgaagctattactccttcactaaaaacctaagccacagtaagtcagggttcacattctacttgtcaaaacaaaaaccccaaacccaaaaacctctgaaccagaaaaggcattacaattttcttgaatggaaagatactgtgatatattctgccaaactaattttgaaatttaacattaaaaaaaaaaaaaaagaactttggctgggactggtagtacatgtctgtagttagcacttgtgttgagaagctgaggcaggaagatcttttgagttcaaggtcaacctggtctacatagtgagctccagaccagccagggctacacagggaacccctggctcaaataaagaacttcagcagatgatattcaaaagaaaattttaaatggtgctcatggcaggatgcagaaacctatacctttggtaagtggacggagggtgatttcaatcttacctacctttttaccttctttcaattaaggctgtgcatgtctttttctttacaaagaggcatagttagtaaaatggggtctttagacctgggcagatggctcagttggtaaagcactgctttgcaagcatgaatattcctggggcctgcaggctggccaggatagccaaatcagtgagctccaggttcaacaagaccccgtctcaaaaaaggaggagagcaactttggaagacattgttgacctcgggtcacacatacatatgcatacacaaaagaaaaggagaaaaaaataggtttgagagggtttcccttccgaagcactgcacattataaacatagcaagcagaacattgtggaacagacactgatcacggaacagaagaaatgagaggcagtatgatcatgcccagaagatcaacagaagatggagaattttaaaccaggagcaaaagcatgcttgctaaatgaatttattatctcttgcaatgaagtgctcaagttcatactagctccctgcctagaagtcacctgatcattactcctttacttaaatatttttacagagaacttggacttgcagtacttatacagttaccaacaaaaagaatgaaagcaactttgaaaagaaggtagtctagtaaagccctcagaattagtagttttcccacagttctctttcatgaataattaagaccatgaatacacaattgcaaagctggtgctggacagttctaaattgtggaaatgcaaatgctggtgttgaaggaaatactgtgtgaggtcaggcctggtgccagctgactccccagcatacccaatggtctgggaagccagggtgtaaggaccaagtccccaaacaccagtcagtagggttggatgacttctttacttggtctgggactttacagatttcctatcagttaaagatggaatagctttcaccagtccagtccatccaaggcttatttggcaaatcctcacaaagctccctcacactgccacaactatgaaggagctatgactgtgtactgtccaccagcttgcagaggtcagtggtcagtgaagagcccagctcaagagcaagagagcagcacatccagtgctttcttaacattaggtggcatgcaagccaggtgtgacagttaagctccaaactcagctcttgggggcccatgcaagaggataactcttaagtttcagtttaaactgggctacatagcagataccgtttccttaaaaagaaaaaaaaaaaaaaagaaaaaataaaagaaaaaaaaaagagatacaaaggtggagtggtagtccaaatctaacactattgcatgtcatttcatagataggtataattcacatggtgtaatacttttttcttttattttactaagggctgtggtctattctaagtacattattttacgtaatccttctaacagtctttaagattttgttgtttctttaaatatgaggaagctaaagcagagactcccagctcacgaagctggtggattaaggaggcaggactagatttcagatgccctgcttgtgctctgagcactgcttcgggaaatgtgcctctcctccaaagcctacctttgggccctggaaagacaacccaattaatagtcagacaacagattttccaggcagcagtgaccttttagactgctgtccctttgcttctctccaatgtcacttttcttagctggacatttacttaatgtcccatttccctcttttcatatcctcctgtggtctggaatcctctatccagccctcagcagttctatctcctgctatacacagagtgaaacctgatgaagagctctcctctcctactgactggctacagcacccgcccctgcctttcaagtccacttgtcttctgcacttcaggactttctaatatttctttcttccctcctcccccacgggtcctcattcttcagagctcagaatatttccagaggctctggttaggccccactatccttcttcatagctttgaaacagcttatacatatgccagttgtagcacacacctgacttctagtataaatgaatgtttttaaaaattccctttttcctaagccacccacccaacttcatgctcttgtgttctctttctctctcaaaaataaaccaatattcacttctcagttcatgatcgtttcaattcccaaggttttatagattctatggactctctccagccctgggttcatgagacagggactggggtcacatggacagctactcttcctgaaggacaagtcacagcaaagtctctttactatcaacaaaaactcacactagggcttgaattttggttcacttacctcttccatgacctttacatatgtatcttaccttcaatgtcagctgtttctcttcctcttagcccccaaatctccagatgttgaaattcaaccatactttcaaggttcagctcaaatatcccttcaaaaaggctttcttcagaaccccaaactctaccttacatcatgccatttccgtgccttaactcatgcgccttagctcctctttaagtgaaagcactatgatgggaaggcagaactgaacataccatctgtgcctcagcaagtgagctgccctggtttggtaggtctggtctcagtgcccagtgtagtgcagaatgtaaacaaaagcccagttcatgctcactatgcttacagtttcagactagagagaggacaaagtaatatgcatactaagtttatgattaaaagggagataaacccagaaattaccaacttctcattaagtcagatgggctattacttctgtggacagcaatgcacgaagccttgagtttcaatggatactcacatagtgtcctatggtgctggcataggtgtcagcgatccaggacatctcccgctcacccgtgctcatgtctggggcaggcacatcaatgccaggacctgggagcacagggaaagggcagtgcgccagtttttaagataatttatcccaaacataaagatgcttgcaattctctaagagaacaatgtcattgtggctagacaactttagatctcattttggtaatgaactggtcacaaaaatacttattaaatgcctcttctctatgaaacttgtatacataatgtcatgtagctattttttttccactgaaatttactgggttgtatctggaagttacctgtggacaacagataaaagttattcctgggactttagggtatgacactggcaaatgtttgttctctcaatgtcagtttcctaaactactgttttgacctccataacaggatcattctggttactaagtagatgtgtttgaaacagcttagctcgctgctggcttaggccttctcagtaagtacaaaagaagaggtggtgacaccgctgaagcaagtttataaggcatgtgatgctttcactcatggaatacttttgtttgatttattagccaactgctgacatatataaaggttctgggattttagctccctagaacacagcaaattaaaataagtatgagaataacactggcccacaggtgtgcagtaccactgctgcttctaacatcattggatatggtgaacttactgagcaccacattcagtgatgttcactacaactgtaaagggagaaagaactatgcaggaatactcttaaaaccaaaagataaaaattttttaaggtgccaattaagtaagatgcagtgtagcatcaatgtactagtcattaaaaagttatttttttaaacccatgtaaatgacttggaattattaccaaatccaccatattgaaaaggcaggtttcatatagctatgtgtgctctcatttacataaaattctatcccatgcttccttttctctctacctaccctatacatgtctctacacacacacacacacacacacacacacacacacacacacgtctgtatgtctccaggttagaaagacaggtatcaataacctgtttactatattcttggatttatgcattataactttctacaatatgctgaattattaagtccctttataaaataaagctcttccaaggaacctaatcctagacactacttttatgaacaaattatgatatcatggatacaagactggcacaagaaaacctttaagtcatggttcaaattttatgccccacctaacctgtcacttcacatccttgtctttgtttttaggcatctttaaatctaaggaagtttaacctccataagcctgttttccatacagagcttctatctgaaggactgatgttctcgcctcatctactcgtctgctttgcttactttccatttgacatactcaggttatatgtcagtacagccttgtttaattgtatttctttcctaagctacaagggagaaattgttatcatatctgtttagaaaaaatctatggagtattatcctagttttcagcaacatttcttgcttcaaatagcaatatgaactgttaaatccgaggaaagcagtttataaatcagaaagacattctgaaaaaacataacgatatgaatgttggctatttctcaagggaagcaaggagaaaggccgtttaaaaaattagcctagacatgctaaaggcaagacagatttcctagtaggttcatgagtttcctaactcacacaaaattgatctacggggatgtacatacagatcacaagtaactcctgcaatacagacaaatccttaaatccactttgtttgacttaaagagctgaaacatggtaatgttggtgtatgagacacaagggcaataagaaagacagagatatgaggaagcttcagggtaaaattacagttgataggtaccatctaaacacacactaagaatgaacatttccaagttttcccaagaatctgaaaaaaggagtattttccaatgtattctgtgaggctggtattattaccaggtttgaacaaagaataatcataaaatgaagaaataatatccaagtttattaagttgacactgtacagaaataaacagccacattggtctacaaatgttaaacatcatttatttccttttgtacagggacaacactgtattaaatatatatagtatcttacccatgtgggtttgattacagaaactactaaatattctttaaaaaaaaaaaaaaaaaccacccaaaaacaagctcccaaacaacccagcaaatcaatatcctttataatagcatcaaagaagagactatgtagctgtctctagtactaagaaagtgtcaagcaacacttgaagaagaaagatgctcaacaaatagatgtccatgttcatggactggaagacttaatttggtaaatatggcagtcccccacaaaacggtctacatacacaacacagttccgatcaaaatcttagctctcttcctctatccacaccccacccataccccatggaatttgattgtaaactcacaaaattaacagggtaagaattcagactcaagtctgactcacaatggagaatttggatgcaagtctgagtcacaatggagaactttgcagaaagggaagtgagaaagtgacagataagctttggaagtttgccctctacaagcaaaggggccaaatgattcatattgaaggtctgccttctttcagagttccaatgagtcactttttatgttttggaactgtcataattaagctggtaaacactgtagatggcaataactatgactgaatgaaatctaaaaaaacacaaggatgttaaaatataattaagattttaggctaagaggaaatatgctatttaaatgaccttgaagtccatggccaggctgagacatgatttcaattcaccatcttgaaatcagaaagcatccctgtagcacgagtgctcattaatttctgttagcaaaatattcctgtgaaacgacgcccaagtaaaattcccaatagtgtcacataagggatgtcaagaactctactgatcttagaactaaatcttataacattctaccttctcgtatatcactcctgtattatttcatatcttatttcctaaaaacaaggcttaatttcctaggaacttatcactggcacaggaaacgtggaaggaaaacacaagggtaggaaagcagagttgagtatggctgtgtgtcccaacccccctttcagccagtttccctttaacatcttattgagtaaccttacttattttatttaaataaaccagaagctttctagaccaagaaatatgagacaaattgcttagaaattaaagagtaaatagtatgtattcatcacaaagaacatatcaatacaaatacaaggcaataaaaaatatcaagcaaatggaagcacccttagaaatttagcatgcttcacaaaagctcctataaataacttgagtactcctcagatcagagacagtgatggcacatggagtagtgagcaattacaccagcctcactgtcagttcccagccaaccactaatgcatatgaaaacaaacaacaaaaaaaaacaaaacaaaacacaaacactggcttcaaatgacatcagatttttattgcttcagaaaaaaactggatggctattaaaaaaacaatttttcacgtgttaaaaatattgttataaattcaatattcagtagtcatgtccttttccatatttcagaaaagaatgcaaacaaggcaggagagatctctccttggtgtctttgtcccacactgcagagtgagaacatgaacttgcctattggagatgtgtcataaaacagccaagacatgtctatgagatctatagcgaaacttggtttctggaagggaaagggcaagggcaactctacccaggcactttataaaggcaggagtttaattcaagaccattaatttttaggtgttttcactttatacaaaaactcatagagcaatacataccaataaatcccttctttgccagctccatagtgaacctccgtgtgatcttttctaattcgttatcctgaagagaaagagagagagagagagagagagagagagagagagagagagagagagagagagaaaaacaatgacaaacattttgatacaaaaatcaaatggataggattctatgtaaacaacaatttcacatccctcatataccacacagtacaacttgtagagaaggtactgttattattattattatttttggagacagggttagcagcctaggtagaccttgaactcatgtatctcagattggttaaaaaaaaaaaaaagtgtttaataaccctagcatgaaaaaaggactttaaatggcctacctggactacaaagaatttaaggcagtgctatgaaaccctgtctcagggacaggaagatacagcttattggtagagcatttgcctagtatgtaaggatcagagcctgggtccaatcttcagtcctgttctgtgtgtacatgtgtgtgagtatggagtaaagacatgactgaattatttttgagagagttttattatgagagtcaaccctaactggtgctgaacttgctatacagtctctattggctgtgaacttagagatctacctgcacctgcaggtgcaatgtctgtaattccagtactggggacactgaggcagaaggatctagagacagatataggttatctagggagactctgtctaaaaacaaagaagaaaaaaggatgtaaagcagaatatgactatgtatcctgcaatcccagtacctgggaggtaaaagaaagattactgagtttgaagccatcttaagagtatacagagtaggaaccaggccagccaggacttcaagatgttatcaccctcaaaccctttcttccttcttctgtctctatttatatacacccaaaacaattatatctatatagacccctgggtcatgcctgtattttcatttacatgttaagttttaataagggtgtgatggttcatgcctgtaatcctgggtctcaggaggactgtagagaatttcaggtcaacctgtccctgtccccaaaacaacaacaagctgggcgttggtggctcatgcctttaatcccagcatttgtgaggcagaggaagttggatctctgtgagttctagaccagcttggtctacaagagctagttccaggacagcctccaaaagccacagagacaccctgtcttgaaaaaccaaaaaccaaaaaccaaaaccaaaaccaaaacaaaaaacctccaaaaaacccaaaaaacaaaaaaccaagccaccaaagaacaaccaaaaaatctcacgtaaaaaagtgaaacagtcccagtacttgggaggcaggaggatctctgtgagtttgaggccagcctggtctacagacaaagtgctaggacaggctccaaatatgcacagagaaaccctgtcttgaaaaacaacaacaaagaagtgaaacagagttggggtttaataaagatgttttagtataggcattgtggactaataaaaaggtactaaaaaaaaaaaggacaagacacatctgagagcacaagtgtgggctcgctccttccttccttccttccttccttccttccttccttccttccttccttccttccttccttccttccttccttccttttttttcccccagactctgtttctctgtgtagctctggctgccctgtaactcactttgtaaacaaggttgatctggaactcacagagatccacctgcctctgcctcctaagtgctgggattaaggtctgtgttaccatcatccagctggtgtgggattcttagagttacagaaataagccacacccaagtgtagtaattggatgctcaaagaagtcatcaaaaggtgaatttaggggaataaaatcacagttattgtgtttgtatatagatcattaatttagtctatgctgaccacaacagcaaccagttttaattaacttggaactaacagaataaagatgatttttactagattagttaaaatttcagatcacaattttaaaacatggatgtaaatgtctgtcagcataaaaatattaactctctaccaagtaagaaaaaggcatcactgcctcgtggcaaggaacaatcagaagttagttggtggtgctatgctttatggctctgggtgtgctttacagacaagctgcacagcaatgacgagcagagcatagaaaccaccctgggagggtctatgggccataacaaccagttgaccaatcagcacagggcaaaccctccaagcctggaggcacaccaatcctgagcctgtgcataaccctagacactccccttacgctgccatataagatctctatgcagacacttcaagctgtctttcctagccatctgccatggcgggtggatgaaagaccctcgttaacatggggttagctcgttaaacaactataataaagcctcatgcagtttgcatcaaaaaaaaaaaaaaaagaaagaaagaaagaaaaagaaaaagaaaaaggcatcaatgccaaacaagcaggcaaacaagtatggcaaaatacattacttagctaatctattattaattgaatagttatttgttttccttcaggaaagtaatggaaaccattaatctcactggtacaaagaacacacttttaggtcctgtgtatgcaaacatcccttggatacttactgtatagttcttggggttgatcttaacacctgctttagcacccccaaatggcacatctgaaagagaagactgaaagatgttgttccatataaaacttaaaaagtataaaaacaatacaaggggaggaatcctcatctcaagtgtttatttcttgcatttaatttacataattagatatcttgaggttgggatccaactctagatgggaattttatgtttcatgtgcatgtagacgataggtaatggtgtagggcattttactattacctacattttgatagtagtccattgcataagatcaggtaggagctttctactgggcacatcatcttggtgttcatatagtttcagattctgaagcatttcagattaggaataccctgatgggggaagtgcttctgtgtatgtgtttgtcttactggatgataaataaagtactgtttggccaatgaggcagcaagttaggcaggactaggagtcaaagaggattctggggaatgtagtagagaagtggtgattccaggcaggaagtgacatagcagggagactcatgtttaagcaaggaaaaacaggaagtagtcccttttccccttcgcatcctccagcagcgcttgtaatccactggcaagggaggacaacaatggaaggtgtccaataagataagtcttataaaacatatagatttatgataattaagactgagctaacagatgagaatcctagtcattggccaagcagcatttgtacataatacaagtctttctgtgcattaattggggccctaacttgggagggtggctgtcgtaaagctcacacgtggaggtgggactcgatggctttaggcggaaagatttatcgtaacaatacccaacctttattacaaaactgtatgactcttttaattctagaaaattccagaaatatatccagggctgaagctttagcttagttggtagagtgcctgcctaacagcaaatgccctgggttcagttatcagcatcacacacaaaaaaccaaaggaaaaaaaaacaaaaacaaacaaacaaaaaactcccctaaaaccctagagatattaaacttgaaatgaagtcttactaaacagatataataatgctagccaggttttaattggatttaatcagtactctatttctaagagaatactgtatttcttttccttctactatttgataagatttaataggatttgatcttatttatggaatatggataagcatttaaaacaaagatctatgtttaaagaaaatccagttaccttttatagaaatttcactgtttaagtttggaaataatgacaaacttttgtatttccttaataaggtattctccttggtgatatattatttcattaaatactgatgtgtgcatccatctatattggtatatactacacatgcaaacacataaataaggagggaatccagtctacattccctatcgcctctgcagagatcctaagcagcaaaattttggtgtaattcagaaatggagaagagtactaaatcatattcaaaaattaaaaagaaaggaaataaaaaggctaagccaggtttgggggcacacacctctaatcccagcatttgggaggcagaggccagaagatctctgtgaatttgatgccagattgtctcacctacagagtttcaggccagccagggctatatagttaagacctcatctcaataaacaaacaaggccctttaaaaacaaaacaaaaaaaccaaaatagttctgttaaaaaatgtatatatatttggtttttcgagatgggatttctttgtattacagccttggctattctagaacagctctgtagaccaggatggccctgaactcaaagatctacatctgcctctgggattaaaggtatatgttaccacacccagctctgttaattatttttatagcatagtaaaagtaatgttggggccaataagttggcgcagcaggtaacagtacttaaaaactcgaccatctgagtatgattccaggaacccaagtaaaggaaataggagagaactgtacaatgttgcctctgacctccataaacatatcataataaacagtaataaaaagtaataatttttaaaagtaaccttgcatataaacatatttcttcagagagttattaggtaccagcagagactcacttaccaaccactgcacacttgtatgtcattaaagaagccagggctttcacttcatccacactcacatcagtgctgtaacggatacctggtgacattgtcatttttaaaaaaaaggcaggggaagaaagagttatatatatttagaatgaacttctggcaagttaattaaaaataatagctataaattgaaaatgtttccactatttatattttacagctacactatttctataaacacttgaaatatcttatgtataaggaaaccataaaagcaaaaaagaaaagctgctgattagacacccaaaaggagtcacagaatggacactaaattaatttatttaatgtattctgatagccaagagtggtaatgaagtctagtttttgcttataaagagatttaaagatgactaaaatatcatttctgcccttaagggacttatagattagtagataaaagcagtaactaatttcacaaagaaagacaaaggttatctcctagggtgcagacaaggtgagagggcttagagggcaaaacgtgttcactgagaaagtttgacaaattgagctgggtccctggaagctaacagtcaaagaacagaacaaatttttggaaggtattttatgatcgtcacaaatgtgctctggcatggtatgcccacactttagacacacaaagaattcaacaaaataattttaaagttatctctagggtacggagagatggctcagcagttaacaggactaatttattcttccagaggacctgggtttagttcatggcagctaacaactgcctgcaactccagttccaggggatccaactgcagatgtggcgcataaataggcaaaacgtctatacacagaaaataagaataaaacttaaaaaatcatttctactcaataccttaaaaaaagtcacaaacagggtttcatatggccaaggctgactttgaacccttgatcatcccaagatgatgagattacaagaatgcttatactactttttctgctacatttcagttgaggcttattctttttccttttactccctggtttcagtgatttggtaacagggatctcaagacaggcgaacgaacagtcaccaggtttgacaaactaatcccattatcatatgtataattctagcattcaggaagttgaggcaagagggttggcagaagtttgatgccagcttgggctacctagtgagttccaggtcagtctggactacacagtgagaacctgaaaaccccaaatgtatccctacatatcatgaaaggactaagatggagtactatgaagtgtcaagccctaagcaggcatggtaaggcatgttgttgacaatccagcactcaggaggctgaatctggacaactgccatgagtctgagtgccgtctggggctattcaatgagtagtcagaacctatctcaagtgaaacaaaacaaaactagttaaaagacaacccaggaaaataagtttgtaaataagatgaaatagtttttataacaaaattttgcttaaatactaaatgttattttttcaaattactgaaaaagctataaagtaacatattagtgaaaactatgccaaagcaccaggtatatggtgtatacctttgatcccagcacttgggaggcagaggcaggcagatctctgagttcaaggccagtctggtctacagatccaggacagccaaggctatacagagaaaccctgtctcataaaacatataagcaaacaactatgccaaagcaaaaattaagtttagtgccttgaccaggtgactagcctacagtatccagagaacaatactgttattcactggggatacggggtttattttatttttatttttggtttttcgagacagggtttctctgtgtagctttggagcctatcctggcactcgctctggagaccaggctggccttgaactcatacagatccgcctgcctctgcctcccaagtgctgggattaaagccttgcgccaccaacgcccagctgggatacggggtttaaaatgaacttttagcacaaaaccctgaactggctgtcaagttaacttcatgtcaactaactactaattactattactgtcaacagcaattacaaagtagcaggacacatatttataggcagggtcttaatgcataacttaagctggacttgaacttactatcctcctgcctccgttttccaagtgctgggattatggctgtgaagcaacttactttttcaaaagggtatatttttatagaaaactgaacacacacattaattatcttggctttattctgaagataagctggcagaattgttaaataagtaaccaagaattattgctgggtgtgatagtgcatgtcgtgtgcaatccaagcactcaggaggagggtttgtggctagtcaggtctagtggtttccacgagagtctgaactacaaagggagacttgtctcaaataaacaaaaacaaaaacaaaacaaacaaacaaacaaacaaaaaaacaagggctggagatatagcttagggtagagcaattgcctagcacttaaaaggctctgggtttggcacccagcactaaaaaaccaaccaaccaaccaaccaatcgccagtgagatggcttagcaggtaacagtgctttccactaagcataattacttgccttcactccctgggactcacacggcagtagataactgatatgcatgtgctgtggtatcccaatatacacaagtaataaaatgaaataaacaattattacttctcttgcatgtatcatttaaaaattactaatgtccttttattataaaaatcttggaaagacaatagttagaaattgcgagtataacaaaacatgtgtttccaatagatggatcttaggaattcttgtttgtgaagtgaagaaaattttcctcagctatgctcatgtggaattattagtcacagcacaggcatttttcttcagactatcaactaatgagtaacttctattggagtgaggcaaggaggggtctcaggaaagcagaagcatagtggattagccctgaacagacaaaggccgggaaagaagggtgcagaaggaaatagaggttgtgacacctggggtcaacaaaggggtttatttcagattacacttccacatcactgtggctcatcaaaggaaatcagggcaggaacccaaacaggtcaggagccgacacagactggcttgctcagtctgttttcttacagcaccctgaatcaccagcccagaagtgacactgcccacagtgagctgtgccctctcacttcaattgctaatcaagaaaatgcaccacagcttgtccacaggccagtttctccactgaggttcccttttccaaaattaccctagctcctgccaatttatctagccagcacaggcagggacagaatgaaaagcttactgccactggaaactttgacttccatgtttaatactaatgaaatgcggcagatatatgcaaacaatacatggcacaacacactactttagcttttactattaaaaacacatttttattatttcatgtgtatgggtgttttgcctgtatgtgtgcctgtggatcgtgtatgggtggtgcctacagagggcagaagagggtgtcagatcctctggaactggtgttacagataattgtgagctgccatgtgggtgctgggtcctcttgcagtgctctcaacttctgagcccaattccagtccctccagcttgcattttaattaccacgtgatccccagcatgctcaagaatctaatgactggtggactcagttgcccgtgtgctaggattacaggcatgcatcgtcatacctagctgtcacccaactttgtaattaatagtttagcttcaaacatgttgggatgacagtgtaagccatagtcataagaaggaacatgtaaaagcacaaatcatctggagtagatgggcaggccagcactcaggaaactaagacagaaggatcagtccaagtctaatgccagaccggataacacactaaccactagttatacagtgagaacacatcccaaaaagaacaaacaacagggccagaaagatagatcagtaggccaaaattccatccctgggatccacatggttcaaagagaggacctcatttcttcttgcaagttgtcctctgacttccatgcacatgccccaatccccccaaaataagtaaaacaaaataaaacccacaaaaataaaaacaaaaccaaagcaaaccaaatctacctcttcaaaactagctggaattgccatagtgatagagaaaacaaaccaccagctcattacataaaaagactaagtgaaaaccacaactgacagcttgacattttcttcctttttctagccaaatcaaaaccaaacacacactgacacaactccttagcgaccgcccttttatatggtgaatcagtaaacatttatggaaattcaaatattttttaaaaaatgacttgaactgggatatccttaatggggcatagtttatctaccagaaattcaaattctagctgtactctaatttttaaaataaactagagttctaaactgtgaatatagctcaggagtagagtgcttgtgtaaggttctgggcttcatcactatcatagaaagaaaaagggaaaagatggaagggagaggaggaagaaaaccagtgaacttaccaaggggctgttctgtccaagacggggaacacgccttttaagaactgctgacttactactgtgcctgttcatcttagcccctttgaagagacaaacttaaccttcctgagaaacaagggttagcctctttactaaagatttaaattatgtcttaaatatgaatgttttttaatcacaatttaagtcactttattagcacttgtgaccagcctcctttgggagaaggctttctcagtaacttaaatctatatcctggaaatggggtaacatatttatatcttcccaaataatctatatttgtaactaggaacaatgtagctgtctttgtgcttaaagtttaccttatcttatcaccatgacagatgggagattatgcattaaaaaaggggatcttttttacattttaaaatattttcttacatattcttttcttctaacaatgacctagtcaatctttcatccccaacaggtctgatgctaaactactgagtataaagccggtattatggtgcatgcctgtaatcccagcacacaggcaactttggccagcctgggttacatagtcaaaatgatacctcttacctccagatgaagttgggtaacatttagcaagaggcaacaataactatcctcacttgttatgaaaagattcaaaggactgaagggttaaaacctcagctttctagtttcaatgggtcttcagagagtcttcaaagagtaagagcagagttactattgaggaaagggaggcaactgaccaagaaacaactgtcaagaagggactatatactatgcaagggcacagccaagaaaaatatatgcatgggctttacacatcatatagtcttaaaattttaaaactcttctttaaaaagaaacatttttatagttaactaatttgagtgtgtgtgtgcgcgtgcttgcacgtgctctcaaacatgcatgcacatgtgcccctgtatgtgtgtggaggacagaggacaatctgaagttagttttctcctaccatgtggatcccagggatggaaatcaggtcatcaggcttggtagcaaatgcatttacctgatgaaccattttgctaacccctagtctctttgttgggttatgttctaaaacttctagtggatgattgaaagtatgcatgataccaaaccctttaaatactatgtatttcctactcacatacatagtatacaaactattacttttcaattttgaaaaagtacttctttttaaaaaataaattttatgtgtatgggtttttttgcctgcctgtatgactgtgcactaagtgcatgtctggtgccgatgaggccagtagagggcattggatcacctggaactggagttacacagttttgagtagctatgtgctgagaattgaatcagggtcctctgaaagagcagggccctcaatgacagtcacctcctgaacctccatttcatttttagtttttaattttttgagactgtggttttgcagcctcggcttagccttggcctttctcctacctcaggctcctgagcagtgggattgtaggtgtgaaccatcacacatggaaaaggaagcactttatggctgctccttggcatatcttaattgccagcacaaccacaaagcataagaaatatgaatatggtaagacaaagtatggccatgaggaggtagttagcatgggattttatgccacttcctagaaatgtacaaaagttaaagaccattttggcctattcctgtgattttctatctaatacatttagactatggttgaatggcttttctggtggggctactgttacctcattctatccctagtatcattaccttttttaccaatctcttagactggaaactttgtaatcatctttggcttttcctgccttcatccatatatactcactgaggaacaccacccttccttcaaaatattttatattttaatttgcctcatttccttttcatactgttactacctatcaccttcactcttagttctcatgctgcctcgttttctgtaatccaccgggcttatcattacccactcaataaagctaaaaaaggaaaaccttctggcccgtcacttttgacatcaaacataatggacttttgaattctctgccaacacaaaatgggcattccctagtttaattcatgtctaacactaaccatccaaagtccagacctcacagattatggctcaataatctcacaagatcacccttcttcagatactagctacaagtactgggtttgagctgggtgatggtagtccagcattagggaggcagaggaaggcagatctctgtgagttcaatgctggcctggcctacaaagcgagtttcaggacagctaaggctattacacagagaaactctgtctcagacaaaactaataaagtactggatttaacttagatacaaaccaggtcccttctcaggttctgcaatatactaccaactcgacaaatcctttaactataactaaggatagagcaaaggaatttctttctccaaggagctaggggtacaccatccttcaagcacaaagatatacttaccaacctggaagctctctgaacttcccattatcttatcactgtttttttttttttttttcttttttcttccgacaggactcactgtgtagccctgactgacctggaaatctctagaaaccagcctagtctttaagagttctttctgctcctgtactcaacatctgtaacattagtggataaaactgattttcataaacaatttaaattatcacagtggaaaatccaatttttttcctccctgagattaaaggcatgtgaaaccaccacccacctggaaaatccaatttctttctgttacaagccaaaaatctcaccttttcactttttttttttatgtaaacattaatcactacccatttttctggagttcaatgtgcactggggcttggtttctgatctatgacatgccagttattacaaagtgtgctctgtacaagtgacctgtaactagttaagtggactcccatacacaaaggatgggagacaagacaatctgtagcacattgcctcaagtttccaggtggagacacatggcctttatgaaatgacaggtctttataaaggcaaacaattctgtatttaactaaaaagtattacaaacacagctaatcgctaaagaatgtataaaccaatctggcttataaagtaggttaacttctgttattttattttgtagcagcaagacacagttacaaccacactttcaaagtattagaaggctacacaagacacccatctactgctcacaatctatgtttaaatgacaatttgagaaagttctaccagaagaaataaccattgataggaaatttttggcttaatagttttaagatcaaggggcaagttagaagacaaagaaaagtgactcctataatcagttgactgctaaattcttctaaactgtttttacttgaaaatttcattttatgtgtatgaatgttttgcctgcatgtatgaacatgtatcacatcactggaactggagatgtggatggttgtgagtcaccattgcgtgctaggaatcaaaccaggtcctctgcaagagcagcacatactctaaacctatgagctgtcctctagccccaaactgattttttaagatctttatgctagaacaatctgccagagaaagttgttctctttcacaatgtgcagcttcaggagagattcaaatggagtggtgagagaagggactgccccggtggatctgccccggcaaacaactgggtgacatgctgcacccagaacatcctcatgtccagtaggaacaatctctacaatcaatgctttaaaacgtatcagaacctttgaaacaggttttctccaatcagttattataatatccatctttacaaaagaattgttttggtttttggagacagggctggccctgaacttcagatcccctgctttgcctccttagtgctgagggctacagaataaaggtacacattgccatacccagctactgactgaatccagggccttgagtgctaggcaaggctccacttaattaagtcaccagtccctctgtaaatcctttctagaagcaaatctagtagcctcagttaaatatgagttggaaaaacagaaccacaaaatcaggtttaattaagtatttatttggaataaagtactcaccaatactcccagtccttaaactactatctcttttcattattgatcagactagtgcttcaatataggatttgtttttgttttttgagtcagggcctcatgctgattagctcaggctggacttcaactcacaactctcctggctcagccctcatagagctaggattgcaagcaaattgtcaccaggcctggttcaaccttgaggactttattttagggaattcaggtctaaggtcactgtggagattagatatagaaagctaaaggctgggaaaaggatgtcaaggaacagatgatggttccttaacaaatactgagagatctgggcaggaggaacaaaaaaatacccaaaatgctgaaagagaagacagtttacctgggggtgatggaggtggtgtaaacatgtttaagagctaaaagactactgaaccgtacagagattattattattattattattattattattattattattattattattaatcccaagcacctaatacatcctgtatttctaagactggaggctataactttctttgagaggtgtggtctcctatttttcccagactcatctcaaactcctgggttcaaatgagcctcatgtcctagtctcctgagcagttgggggaaatagatgcatactaaacagtttgctttttgataattgtcctagatattgagaaagctttagacttttgacagagaaaattcccactgaaaataagttccttttacatatgttttctgcaagaatgctgagattgttaacactttgaaataaagaatgggagtctataacactcagattttgctaatcatctaatatactatttatttatttccttaagggttttcatggctatacaatctttcccagttcataaagtttttcagcccccttaagatgttaaaacatttaacactttataaagacttttttttttcttgctgtatcatcatgcaatacagttactgtgaactaactacaaatcagtttttctgtttctgtcctgggacttagctctttcagtaccagtcctctttgtagagactgataacggcatctttcactctattttaagcaagtgccatggttactgtgatctgctaaggctggtgatatttgttgctaggttcaatattttggtattagaacttctgcaataacaagaacatttaaaatgacacaccatagcaaacttaaattgctttaatgactttgtggagctgtgacaagacagaaagaggacttggggtcaaaaacatcaaatcacaggatacagaagagccatcctaagaaaatggaaaatgctgcacgacctttgtaaagacgagcacagtttagcattttcaatacaatgcctcttgctccaacatccttgtttgctctgtaggggagtacaaaagtgttcctggcttggggaatgagggagtggtaggaagaaggaagggtaggagaaggactgtgtgggaaattagaggtcaaagtggttccaactgcttctagcagaggtaactacagagctaaggggcaattaggctccaaaggtaaatcctataagtgggtggactcaatgcaaattttgtaaattattgaacccttagccacaacctttgttcctccacagcccgggtttttccggtgtagaaacattgctacaatttacccccttttaactctgcgtgtagcaaaaaaaaagactactggaataagcggcagacaatggtctagccagttggttctcaaccagtgagtctcgaccaccacggggctcacatagtgtatatttacatcacgattcctagcaaaattacagttatgaagtagcaacgaaagaattttatggttgggggtcaccacaacataaggaactgtattaacgggtcgcagcgttaggaaggttgagattcactggtctagtccaaactcctctatgctcacttgccaactcaacagcaaaagaaaaaaggtggctttccttttactcttgggtcattttttttttttaaatcacctttaaagctgtattatgaaatgtattggggagaaaaaaaaaaggtttttacttgcctaaagaaagcaatgcgaatagaaaagcgaaatctacacacatccaaaattttaaaccacaggataccttcatgactaccaactctctaaggactaccttttgcagaggctcaaatctggtagtagccaggacaagaacacacccccagggctatttcattctattggctggcaggctgttctgtagtctacaccctttagatttaatgtcaggacgccctatctttgtcagagacgttacactgccgtatttttttttgagggggaggggtggaaaggggcacaacacaaaaagtcatcagtgtaaaaatcctattaatttataagattagtaagctctgctagtcaataaaactttctagatttcaactccagaaagaattttttttttctgttcttgtaccatctgccattggtgttacaggctcacgctgggtgacaggcactgaggccaaaaggaaaccggtgcagtgtcctcagtgcagacaacatcaacacatgcagaggcccggggtgaagacttgcccagaaagaaggctggcaaattacgtggtagttttggggcggaaaaaaaaaatcagtatcctctaaggctgccacaccctaggcggagagcttagaggggggcacggcctgcggagctgggctgggccgagtagcggcccgggcggctggaggctgcaggggagggcgggcgggaaggggcccgtgggcgctcacctcccttgcagggcgtgcggtgctggctgtgttgagcccggtagccttcgatgacctcccaggagccgtcgtcgcgccggatggggaaggacaggctcaacacatggttgcagggcttgatgatccgcagaatgccgcgcacccggttccgcttttgctcctcgctctcccgggtcttcaggtcctccaccagtttgtcctccacgatgctggcgccacggtcgaagaagccctccaccatcttgaagaagttggggtcgtcttcgcggtcggcggccgcctcgctgtactggcgccgggaggttggcgcgagcccggaatgcggggcagcagagggctgtccgcgggcccagcccagcagcgcggccgaatctgcggccgcagagcccagggcagcgggcccggagcgggacagcagcagtgcttctccgagacggcggtacatggcggcgggctgtggagagagcggtggggccggagactaccagagctcgcaggcctggaccgcgggaggaagggctgggcgcgcgctgcccttttaagccgcagcttcctgcttgccaagctgtcccctcccctgcgcagcctctcgccccaccgggaggacggacttcggcggccgcgcgccgcccagggcgctgggcctcgcctccgccgcggcttcgcccggcctccaggcggcggcggcggcggcggcggcggcgggggcgcgcaagcgcagacggggttcgtgcgcatgctcgtcggggcggggctagagcgggcacgcgcgcggacccgggtagggaggcccgggcaactgagagccttcagaagtgtgagcgtcccaaaaggttggtgtcctgttttacgcgcggaggcctagtcggcgggagcggactgcagggaggccacgcgctctggcccggaacccggaccgcatgagtgtgcagaactgagtgtgcgggtttgcggcgcggctggcgggagagcgacgtcaagcagctggggagttcaggctggaaagcaagaaaacttaggattagaggaccccactggcctttactttgcacaaggttttaatttgttctattcagcgactttgaggtaaaatagtaatgcaaagcattgttgtctctctcgtgtgctaccttatttattttttaagagtcagtttcatcctgtagcccaggctggcctgaaatgcaaggcaacatgcctgctaggattacaggcacgtgccaccacacctgtacattgttgtaactttacaatgggctgagtgtgtgcctcccctttagaattgtcctaaagtaagacaatgtaactagaaataggataatgcccccagaaatgtctcagtatatatatttagtttctgagactcgatttatggatcaggctgtccttgaacaactcacagagatgggtcttctcctgtctcctgagtgctcagatgaaagtgtcagaatctgatttgtgaattacaagtttcataatggtagccaggcgtgggtgttgcatgcctggaaccccaggaactgggaggtaggggctggaggattgaatttgagaccagcctgagctacataagatactttttcttgttcttcaaaacaaaaatgaatctatataagagttcatttacacactcacacccacgtgcttgcaaaggtccaataacatcttttaaggcaagttaccaaatgccacactactagtgaaagcatcttggcagttttgtaaaacaagtcttgtacttcctgacataatccatctgtgactttattcatctattgcaacatggaagagaagttactgttatcttattattgttattatttggtttttcaagacaaggtttctctgtgtagccctggctgtcctgtaattcactgtgtagaccaggctggccttgaactgggaaatctgcttgcctcggtctcctacacctggctgagaaattcttcttacagtgttttgtaaatgtgaggtgacaacctagaccatttacctcagtgtattctgaagcaaaattgatctttctttagcagcttatatcttaccctacttgccgaataaatgataaccattcattgtatttgtattctgttttttagcaaaaaaagattctctggcctgcaccgtgattttggcttgatgtgaaaagactaaggtaccaaatttccttctcacttgataatattatcgctttatgatttgacattccacctagtccctggagcttcagaagaataaagccccaaaccctgaagtttaggcatcaccctgaatggcgcccaggagtacatggacatggttttctttccatgataaaatttctaagaacttggtttcatctttcttatttcttttttagttttttgttttgagacaagagtcttactccatacataacccaggcaagtttgtaactcactttgtggctcaggctgggattgtctggtgagctaccatatcagataattttttttcttggtaacttagccttcaaaataaataagtaaataagtaaagaaatgtttgatactgatttttctgtgttttagttacctgaattttggaagtgatgagaaatacctatgtataaacagttgttttcttttttttttttttaaattgtgcatctcctgtgtttcagtatcttaaaaaatgactctcagatccgtgggcatggtggcactgcctgtaattttagggcttgggtggctaaagcaggaggattgccatgaatttgaggttatcctgggtcacataatgaattccaggttatccagtgagacactgtcttaaggggaaaaaagcaaacaaacaaaataacaactttgagaatcttataatgtagctgcttttattaaaattaaaaaaatgttttaacgttatatgcaagttacaaataatttaaatagtatatattgataggtttttgttttcttttgtgttgtgttttgttttggtttttcgagacagggtttctctgtagctttggagcctaacctggcactcactctgtagaccaggctgccctccaactcacagaggcctgcctctgcctcccgagtgctgggattaaaggcgtgtgccaccaacgcccagcctattgataggtttttaaaaaataaaagtgggcatgtttttgataccatgcctttgatctttggcagaggcaggcttatttttgacttggagaggaacctgttctacatagcaagaacctatctaccccccacccccaaagaatgaacttctacaagtccacctctttaacccctgtttagtatatcttttcaccctcaaggaggtattgtaactccttacttataggaggcactgaggctcaggggcacaagtatttgttaatgttcacctatctaataaataggctattattcaaacttacatgactccaaaattctgttactttttcctactcaaaaatgtatatttgcttcatttgactgcttcataaaatatatgaataatgtccaaattgcagtttaattattcatagtaatttccatttcaaaaaggtaccaaaatttaacttgaaaagaattttagtctttgatggcatccaacaaagacaaattggtttgctgcctttgatgttgataggactttttcttgctattttacaattttgccctgttcttgatctatagtgctcttttgtacttttaagttcttgaaaaagattttagaagaatgttagaatttagacatagcatataaatgcatgagcaaaaatcattgaatggattatttagtttgaaagggttgtatacattttctattctgtacatttcatttaattggaatcattcaatatatgatcctcaggtgttttaaaaatatattaatgtagccacttcattgcctgactgtacccctctctctctctttttcttttatgatctatcactaaactatacccacaattgtcatatttttaaaattcagtccctccctcctttttttttttttttgagacaggtctcattttatagcttagggttggccaataacttactatgtagcccagcctgtagcaatcttcctacctcagcctcttaagtattgagcttataggcatgagccttgatgcctggattgtcctttttttttctcccccccaatagagagggtcttgtgtattgtagatggtcacaaacttactttgtagttgagaatgaccttgtactctgttcctcctgcttcttccttccaagtattggtattacaggcatgtgccaacttattcagttcccttttattaatgaattatgagagttattttgatacatttgagtcctttgtcagatatgtgtttgcaagtgttttccctctttttagtgttatctttccttaatatgtgtatgtaatattatattctctggaaaataaatttaccgaatatgtttatgtatcttcatttcattcattcatatgcccattcttttgtttgtttgttgtttgttttgtttttcaagacagggtttctctgtgttgctttggagcctgtcctgaaattcactctgtagacaaggctagccttgaactcacagagatccacctgcctctgcctcccaagtgctgggactaaaggtgtacaccactgcagaaggaaggagactttctctgtctatctcggttggactggaccggtttctcttcacccacggggtccctgaagccacttaatgaaataaccactctgaggtttaatatcagttacaattgtttggcccttggcttaggcttcttattggctagttctctcttaattattaacccatttctattaatctgtatatcaccacaaggccttggcttacctaggcaatgacctggtgtccttcctacctgggggctacatggcatctatctgttcactctatcttccttttccttgcctctttggaattcctgcctagctaaagtctgcctctccattggctggaacaactgtattcatcaaccaataagagaaaaatatagtcacagcatacagaaggacatccccatcatttttttctaaataaaaaggaaggttttaacttcaacatagtaaaattatgtataacaaaacagttatcaagtgagaattatagttataatatttagttcatttacatttggcaaaatttaaagaaaattatctatcttatctttgtgagtctaaagtattatatctattttgtcttttattataacaaaggagaacaactatgactggcttcaactctatcaaagaccccagaaggatataatattacataagtaaacaggaagtgtgttgacatatttcactgcctggacagtcacccaaagctcctctgcaacattggggcatccatcttcagtacacaagctcatagtatctggcagacttttcagtgaagcaggaaattggaagatctattttgtcttatactggcaaagtttgtcagttgctttcttctgtgtcctgtagaatgtctgcagtttcttctgtgaagcagaaccctgaaggttcttgccagtcttgtggcaagtttagcagtcacttttttgtgggtcacatacagtttacatagtatatagtcaaagtagttcaggcaagacagtttcttgtccaaattgctatctcttccacactgaagcaaactctatatggagtttttttgatgcccatcatcctctctgatgtaattggtgctgccaggagcagatgtgtctcattgtcatgaaaaaccccaagttaacaaaccattttaaatgccatattctgtaggtctttgaaaggttttgaagaatacctaaccatctgaaatatatctatatctagaaaaactaacataagttttgactactatagatgactataatatgtatttcttaattatacattacctttttaaatgagctgtataaacataacaagagtagaaatgtacatataacaacatttaccttaaatttgtatcagtaatctaaaatccataccaatgcaaattattcatttgtatatcatatccatccctttttttttctttagaaagggattgactatgattatcaaccatttataatcaaccccctttaaatgaaaacaaacatttataaacaatatttgggaatttgggtgtagcttttcagactactttctgctgattggggccactgctaatctcatggggctactgagaaaatccacaaccatgccaaatcctagctgtagcagtttgtgaggttccagtgtctcatcctacacaccaccaccaccctgcatgcccattcttttaattaaaatgttattattgtatattgggggttgtgcctattgcagcacattatgtaggtcacagaagacaaatttctggagtaggtttttgtgggggatccctgcagatgtcatacggggaagtgaaccccataaacagagaagaatgaaaatccagtgcagatttgtcaaactcgatcagacttctgggagtcaaatgtcaggaggttcattgtcagcatattagaggaaaggtttctagggactagttagtccaatcagttcaattcatgtgcacagtaaagcttaaggtgtgactacatagagactcttttatagtgcatagtccatgtggtatgagggtgggttctatagctaaaaggcctagaatctagtgtggtctctgaccaatagcatagtggtcagcagggcataaagtacgggtgtcctctcctctaaggacaggtaatggtctagggaggaagatggcaaaggatctaaggatagtcattctgggtaactagggtgaagtctgccctcatagagagcacaaaggtcatcaggtcattgacaacctccagtctcagctttcaggatagaatgcaggtatttgatatgtatgttctccattgaggagacacccctgtgtgattaacattccaggttctcttagtgcttcactgtgaggacaaggacctctgtacctgtgggatctggggatctattcaggtcaccaggcttggcaacaagggcctttacccgctgagtcacctcactggccctagtatgttcttatagctgcaccacactgccctgattattgcagcttgtttgctttttgttttgagacaaggtctgtgtagcacaggtaagcctcagacttgctgtctggctgacactggactttcccacctcctgagtgctggtttccttccttccttccttccttccttccttccttccttccttccttccctccctccctccctcccttctttctttcttttttcttttttttgagacagggtttgtctgatagaccaggctggcctcgaactcacagagatccacctgcctctgcctctgcctcccaagtgctgggactaaaggcatgtgccaccatcacccagcctgagtgttggttttatagttatcttcctccctctgtcctttcctttctcttttcactgtagctttgttctatattccaaacttgttctttttagtaattggttgttctatgccacttgaatttccatatgaattttaagatcttgctgatctgtgtaaagaattcagaattatgatgggtattaggttgaatctgtaagtcaatttgggacagttctgaaaagttatatgagaatgtaaccatgaaatttgttacagtaacagagccggtgcctcagtggtgagcatattttaaattctgagcactttgggatcagaaatagaataaaaaaatcacaaaaacttcattaggatgttttagatttatagattggtatgcatctgacttaagtgtttttgtagaattaccttttaagacattagtctgtgactccaaaataaaatgtgtagtaaactaataaaaaataaaaccttcacttctttgaattcctttaattgtgtgtgtttgtctatccatgtgtaatctgttttagcttcccaagtgttgagattgcagtttctcaccatttttattaatctgtgtattgctacatggctgtggctttattggtctgccagtgtcttgcttcttggatggctggctcaagtctctctttctccttgtctgtccatttggctttcctaactctatttattcttcctggctatagaccaatttaatttttattaatgtatcaaccaatgaaagcaacacattttcacagcttatggaaggatcatcccatagcttccttctatttattctctttgtcccacctatccttctcctgctcagctctttactggaccaatcaggcattttagacagctaaagcaacatagctttacagagttaaacaaatgcaacataaaagaatacaacacatctttgcatttttaagtaaatattccaccacataaacaatgtaacacatcttaaactaatattccacaacagttatctattaactatacctgattttatacaagcctatttttagttacttgctttaagctcaaccttgaagaatgtatacaggaggctaaataaggcttatccctgtaaatgaatgaattgcatttgacgttttgagcacattgaagaatttggtttctataaaatgactgaacattaactagcaagccttattatctttggcagtttacaacaagctagtagcttttataagattagaattttacagctttatccctattaagtttgagccttaaaaatttgagttgaagatttaactgaagatctttgagtatcaaaataaaactttaagccataaatacagtccatagggagacttggaactttgctgatcctttttatagttcatcattacagaatatcacattttcttctatgactcagtttatccaaatagctaaaacataaattagttactgttaatctgagtagggatttataagccttatttatcaaacatatattcttcattttttaaaacttttttgaagcctggtgtttgttattgttttgtttaaaaagaagaaaagagaaatattgagacagacatattgactataagtttattataaggcccgatggaatgtggagactaagaagaggaacagggtaatggctgactgccatggccggtcaccatagagagacagagcgggggaaacagagacaggagagcacacacagagagagagagacagggggagagagagacagggagagagagagagagagagagagagagagagagagagagagagagagagggagagagagagagagcgtaaaggtgcaggggcctatcttttaaaggggtcctctgcacctgcgtgaagacttctttcccatggaaccttgggctgaccagggtattgcctgagtggattccaccaggtaacaggggcaggccagcataatgcctgaacctttcagtgttgagcaaggacatagtggttaggcatagatctctaagtttttgttaacctaagtatatctctataatcttaggaatttataaaccttacaaaaatttatattaatctaaatattttggagaactaccattgtcttcttagtctgaaaactagacacaatggtaaatggagaggtcattagttttaagttttataattgctgctttataccacgtgttcatctcaagatggtgaagtcacatggcatgtgttctttaatcttagtaaagatggctgccagtcatgtggttgcttccatcttgatgaggtcatcagtcaagatggaggagggccaggtggttgctattttaaaacatttttccctaaacaagagttgaactcaagttacatatacagaaagtagatctatgtttctaaaagttgaatctcatatagcaaattaagagtcaaccttttgttacaagttttttttttgttacaagttttaagttaactcttttgttacaaattttatagcttctttaactatactcagtgaaattacaaatcctgagataaagactgtttgtacaatagtcttagacgatttcttgagagcagagcacagagaaatcttagaaataaaagattttcgccgggcgttggtggtgcacacctttaatcccagcactcgggaggcagaggcaggtggatctctatgagttcgaaaccagcctggtttacaagagctagttccaggacagcctccaaagccacagagaaaccctgtctcgaaaaaaaaaaagaaaagaaaaaaaaattttcacgattactaagttaaaaaaatcttaacaatatgagactttgggatcaaggcttgggcagtggcagaagttgttacaatgtgtgccatctttgaccattgagctctactgaggccaaactgtttgcagcaagacagcaagactttaatcagatctctcagtcagaggaaggagttgagtcctttggggaaaggaggaagggtccctcaagtagctcccccataggaagggttccaataagcaccaagaggaagctgagagatagagaacagtgtgagggacaaggaggaacagaagtaattccaccatgggatggttgcaataccatagaggccataggagtatagagaagccacaaaactaggaaggagaaaaagacaggggggcaaggtcacagaggcccagaaaggcttttagaagctgtgggactttgctggttcttatgggggaggtgcggaagttccatgaaggagctgagagaggccatgagggagcaggggggggggggaagtgtcatggggacaagaatttcaattcagagtacctccaagcagaattggagacttttcagagaaaaatgtcccaaatcatagaggagagacatccctttccccttgatagacctcagtagggtgagaggaacatcctggcacactggtctcgcttttgcagtaaaagtagacaaagcaggcagccccatagtaacacttacctggtaggggacaatgaatagagctggtagactaggagagactcctgggaaaagggagaggagtaagtgtcttagtaggaaattgtccatgtggtaggcactgtgaagagcttagccgggagatgcctatgggtgcagcccagagggcatagcagggtcccagatccagagagccagggagatgcctatgtggtgggtttcccagaggatgtagtaggctcaggagccagagagagagaggaccctgaatatgagaggttagagcaggtggagggaagaagcagctgaagaattagactcttagaatttgtagtcaaatatggtgggtggtagaagccagcggaaacaaatgatccatacataccttagagtcaaaccagcatcttggttcagagaggctgagtcccttggaaaggcactcatatatattccagtcctggttttcagcaccagaagaatgaaaaaaatgaaataaaaaggaaagatatgacttcctaaagtatggagatttttattggagatataagggagaaaacagaaagagggaagagttcaggctgaacatggctggcagactaaatggggccatgagaggtgagatggggagggagagggacagagtgggagcaagccaactgagagaggtggtcagggccaagaggccaggggactagcaaagccaaaatggctggattatatagaggtcaggctggggcaggggaacccagtccctgggagtgagaggtttagggtagagggctagatgagaagccctgggaagaaccacaggtactgagtgatgctgggagagctgaccagcaactgtcttggtatattaatagatacctgttagccatttttccctgtttctgagataccttcactctcccctctcctttttcttcctggtgtattagtgaaaacccatgaaaaggaggaatatggggatctgatacaagtgtcagttggatttgaaaaagggtttgtggttatcatttggtacataaaaatcctagtaatgccaagtgatagggtcttactttttatagtccaagctggcgttaatctcccagactagccttggcttgaaattcttctgcttcagcctccaaatgcttggttttataggtgtgtgtaccacatctagcaagatggcttttatagaagaccattcagtaaatagagctaaggcaaaagtgttggcacatacctgtcattccatcacttgggaggctgaggtaggaaacttgtcagtttggggccagcctgttaggtggggagtatcatgcttttagcttcttatccttgttagcccctagttaagagtatgtactgcttttgcagataacctgtgtttggttcctagcacctacatagtagcctacaaccacctgtagtgttttttggcctctgctagtagcctttacatgatgcacagtaactctgcaggcatacacacacatacacatgcctttttttttttttttttttttttaagccaggctgttgtaattaagaaaaaaagtgggaaagtggccattccacagagctcacatggaggagaattttattaggggaaagagaatgggaaaggggggacgtgggaagactggcctctagggacaaaagcagcagaagagaaaagagaggcagagaggggggatgagacagagagaagcggagagggagggagggagggagaggagagagagagagagagagagagagagagagagagagagagagagaggagatgggaggtgagcagggcccctttaaatgggaacacagtgtgcacaggaggtgctcttagtggctgcaactgaggatgtatcctgtcagaaccccaagggcaggccattacagatgaatactagcaatggtagtgcatgtctttaatcccagaatttgggaggcagaggctggcaaatttctgaatttgaggcgagcctggactacaaagagagtttaagacagcagggctacacagagacactttgttttgaaaaaaaaaaatcatttaaaatgttacatcataacatatacaataaataaatgtaataaaaatatttcaaggctgtttcactcccaagcaaagtcagctgctctccggtgtttttccaggaaatctctgtgtgaggtttgctgtggggtatggtgtgactttgtggtattcttgggctcccaactgctaggatacctttcccctcagagctgtaacacttagaactaggtctcttatcactgagttctggagtgagcaggtggaaattagccacttttaaactacaaggcagcactcactgacagtcactggctgacactgtggacatgtagaaaggggtactccttcagtaagaacatttccatcctgtcctgggaagagaccaactgaccttttagtgcctgctgccctatgtacagagtaggagcagcaacttcctactcatccatacagggctgtatcatgaacaaatttcatggctgttgagctcagtaacaccccctttcccccaccctgccctgcagcctctgggcagtgacatcagggacagagatgggatatccagaactcagccaagaagaaagagcagtgtgtcacctaaggaggaatttgcatttatgttgtggagggcattgagagggaaggaaacagcttagagcagagggaaataaacaggattctgtggaagttaagaaaacattttaatttttaaatttaggtaaaattaaagtt

SEQ ID NO: 26 - DNA, 61245 bp, Cricetulus griseus
  >scaffold_16 dna:scaffold scaffold:CHOK1GS_HDv1:scaffold_16:34171408:34232652:1
  misc_feature 9223..9322: /note="n is unknown"
actcacaacaggacaccacacctctctcttttcctttctccttctgtctgccatcataagcaaacagagccctgaaaagtagagtgccaaattctgagctaacatttcccagtggagttcctatgaaggcattgggctgcacatcactgcagagccactgagaggaaggaaaatatccacagagtcagcgggccaggctggaaagggtgactagaatgtgaatcacctcaggtcaggacaggctcttgactttaaggaggtcagcacaaacatggcaaacatggtgtctgttctgctaccctcaccttggcacatgtagcaggtgtctgctctcactgcctctcccgggacagcctatgcaactgcttctcatggtcatcacactctacatttgaagactttggcccctccaaacactgctgtaaccaaacccccaaaccatggttccagcctttgtcacattggtgactcagacactatcacccccacccattccatattttttccctccactctgaagtgccttcgtgataacttatgtactcaagtcttcctctgtcctccctagaagttctcacaatgacttctcactgtttccaggctgtcccagcttcctcctctcctattgtgagtcctttatttatgaatgggagacttgcatgacaagccatctactgatgttccacagaaagtcttgggtctttctggcctgaatgaaaagctcagtgtgaaattcttccaaacctgcagagcctcctccctccctctccaggactccacagctagggtcacacactgaggtgctgtccctccccaactcgatgggtagctactttctaaactcagttgtttcctgagctccccctttccttgaagccccctttcccaaatcaactcagatacaatcatctttgcctgggcaacaacatacaggcctgtgcagtgaccaaggaaatgctctgcttttactgtctgcagatgtgcaaacggaggtcttcagaggctgcagcagtggttggaggctggcaagcacctcagcctaagattcttagtttgcctggcctcatgcctaagcaccaaccccttcatgacagcattgaggtccctagactcaggcctaacagtcttgtcctctctccaaatgcaattatggtctcctggctcacagagtaaaccctatttctgccctagaccatgagtcatagtatatccaacatgatcacatatctatcaacacaaccagctgctcggctaacaactgctgagctgtctcatgacgcatgcacccggggtgctgaggcacccatctccacatctgctcaaactaaacttctggcaaatggtttagaatatcgatttccaggcttctgagatgactgcaatatggttactcccctgggctgtctgatcctccactccaggtatggttcctccatgtggtcctccagatctcttcacaaaagtcacctttgtcacttctcctttaacatcgtatgaataacagtcttccatgtgatattgctgtctgttcaactagttgctgttccctgggggcacaggaatgttgtattcacctttgcccctggaactggcaggatgcttttcagtccaaggaatgatggggcccaagcagtacctgcctggagcagagggagataggccggaaggaggcggggaccagaaacaatgtgctaggagccatccaacactatgcatctcttgtgtgtgtgtgtgtgtgtgtgtgtgtgtgtgtgtgtgtgtgagagagagagagagagagagagagagagagagagagagagagtcagacacacacacacacacacacagaggcacagacacagagacagagacagacagagatagacaaagggattagagaaaggctgtgacatactagattatagattatacaggaggtgctcaataataactgctataatagttgcaacagtcgcaggtcacatgggcttagccattacatgctatgcatgggtcttgattttctacacaaattatttattttttacacaagtctcctcacaacttccactttacatatgtgttacctgaggtgtgcagaggctgagacagttgcctgaagtcacagtacaggcaggtaatgcactctgctctggaatccgtatttgctggcttcggggccagtatactaactcctcaatacactactatgggcctctatgaccttttccaggaagtccgtgcagggacaaagatgggactgtgaggagaatcccgaggctcactgaaagcctctggcttcttgttggatgatatagtaagaatggccctgtagagagaaatatgcacctccctgggtgagggagttggagaggggtgaacaggaagaagatggaggggctaaggggtttaggacatatatgtgacaacagcagatgcagacatgcatacacatacatacacatgtatgcacacacacatatacacatgtgttttaaaagaacatggtgacatctttctgaaatactccttgtaaggataggaagaagggaaagaaactacatgctcacggctaaggacatggataaggtcgggtggaagaaggaatcagagagggagattccacaggggccagtgtgggaatctgagctcaggttgagcttgtgggtggtttgcttgggctagtgggaagctatcccaaattgtggcagaaggcaaagaggtgtcaatgggtggggccaggggtcttacagaagtgaccagaccctccacttggaggttccagaaccacctgtgtccccacagtcctctgtacttgggtctcacttgtagggagacactgtagccccacctcctaggagcggtgtggtcaggggaggttcttaaggagagcactctctttctgggctccctagcctgctgcctgagggtggtggctggtgttcatctgaataaagacatccttatacctatactcactgcaccccatcccaccactgttgcagcagccctgagccagggtagcctggcacagactgtactgggcactccacatattgccacttggtctggtgagggagcatggggtgccctagtcacactagctctggcccagatttcccaagaggtggacaggggaggcatggcttcctgtctgtctgagatgggaaaaagaagagtgacaatgtgtggctagggctggggcagggtgggtaaaggttggtgatcataggtgcccgtgacttccaggagtgaagccaggtggtgacaggtgtcatgttggtcctgtcctttcagacagcatatctacactagggtcccagcagcacctcctgccttttcctcactgggtgtcacatgctgtctccagattgttcaggtgactcagcctgagttcctagggctactccttagaaccacttctgtctacactgtctcatggatttaaaagtcatccatgtgcagttcagttctgaacttgagaccaagtgtcatactgccctgacagtcccagtagcacaagctgggcattaaattgtcttttcctggggctggagagatggcttagaggttaagaacactgactgctcttccagaggacctgagttcaattcccagcaaccacatggcagctcacaactgttcagttccaggggatctgataccttcacaccaatgcacataaaataaagttaaataaattattttaaaaaaatgtcttttcctgtcctgccacccatttctctcatggcctccccatctcagtcagtaggaaccccattctctggaccaccatcacccattaatcagtgctgtccatcctctcctgcctccacacacttccccgctctgcaatcatctcttgcaatgggcagccagggagttttcaaagagaagagttagaacaagatgttcaatggaaaccctgcaggaacctaccatcactggctcatgagggtcccagggacccagcctcatgactttatagactttctcagagcccaagccccatcacaatgtcctttgcagatatggctgtgctcagtccagtgccctcccctgataacattagggctccctcactcttcatgccgcccataaatgcctttcttctgaggttagcaataacacgcaaactccttacctctctcatgccccctttcagtttcactgtaacattaactgtcacacctgggactgattctgggaccccccctcccggtatttcaaacccctcagaggctcaaccccctcatataaaatgacagtatttgcctataacttacacaattcccctagacactctttcctagataacttatagaacctgatacaatgcaggtgctatgtcagtagtcattacaccacatcattttaggaaacaatgctatgaaaaagtttgtacctattcaacacagatacagttatttttcctcagtctgcagtcagttgtatctggggatacagggcccgtaaatatggaaggacacttatgtttcaatgctgttatgggacacagggaaagcaagatttggaacattacaggaaacataaactccacaaaaggggagagaatcgccagccccaaacagaagatttcacaatgtggtttgggtggctataggtttcgtatagaacaaggtctgtaagggacatatcccacccaacaggttatgtgtgtgaagggaggaacagagctgtgatactgtatggattcaaactatttatgtaaattagtgaaagctgcttggaaggcagctggatcccttggaatgtctaaaacaaccatgaatagatcactcactgggtagatgtttgaatttttcctgtgacaagcaccatacatggctgtaaccacaactaagagtagcaaagacctagtctcccgtctgtgggaggcactaggcaggtgacaggctaacatctcatatatcaggacaggacatagcctgggcctagcctgcctaccgaccttccaaggaccacagttaggggctgccagttgtacggatccccccataggtgagtccttggtgtgcctgggtttccttcagcctgtagataggctcagtgtgggccagcaatcacttacctagggtgactgatgctaaggaattcttctgagaatgctccaagatgcctttcaaatcgtgatgtgcagcagctctgcccaaattctcttggatcccttttaggatcttcatgctccctctctttcagtgggcttcaaatttgacacggtccactcccagggggattctcagggcggccagactgtttcagactgccctttggctgctggagtctgctttacccctaatgggagaactaggagtgccggggaatttatgtcatcctcagaaggtaatcctggtcaaagctgagttccctggggcttaggcaaagagctccttttatggcttggatcccattcctcctctagaatctgtcccgttcctcgaccctcctcacttctctaccagccaggaaacatctttaatgaaaactgtgtgtgagtcctttatttgggtctgctttagagaccctcactggacacattcaataacttttaggagctttgtaaaggcctcgaggtagcccaggtgcagcagccactgaccctgctctggaccacatgccctggggttgggcgccctgcagcaagcctgagggtgtgtgtgtgtctgcagctgtgtgagtgcagcactgtgtgagttcagcaccagagtacggagcagcagcaggaggagagcagaaacacaagtgatttatggaagtcgatgagattttaaagtgggctggggaaacagcaagatgaatctcagctgaattgatttaaagggtaagtattgagggcgaaagattgattggggggtagaggggtgaggtaatggaagggcatgggggaggggccaatgggatgttttataaacttaatgcgatttgtagccaaggttgaggggctctgctggggtcctgtgctgtcccaggagtgagctgtagtagatgatttatcgcacagtggctctgagtgcctctacttttttttttttgactgttagttttctgtctgggctctgtttggacatctgttcttccatgggtccttcatcttcccaaggcctagacacctagctgggccctcataaagggacgttccttcctgcctggagaacttcaaggtaacaacgtgcaaacctattctctaactccatcaatgggaatcttaacttttaaaatagtaatgaggttgcctgggaaattctggcaacttttcataaagagtgttttaaagatttaaagagtcaatataagagattacattcttaaaagttagcctcattggctcagctggcctgcctttttttttttgttgttaggctatgtggtacagaggccagaggacacttggacttcttcttctttacttccatgcaggcacaccccaaggttcaactgcatacagtcatcattttcacttatccagtatttgaatttaggggccttctctgtgttcagcactgggagactctggaggaaggtgactggtgggcagagctggacagggaacaaacactgctgttctcttggcatccacagaggaaaaggagcatgaagcaggcaaagtcaaggtcaggttaggaggacaaggcagctggaggaggcaggaaggccataactgaggctgaggtagaatgagtggatgaagcaaggaagttgtatacagggagggccaaggagtgaagggaattgtccagaggcagaataagtagacatgggggggaggggtaagaagaaggtccataacccagtgcatctggttggctcctaggctcttaactttgatcttggagaaaccattcctgagtgcccatcaggatcctcagttgggcttctacccacaacctctatctacactatgcagaagttaagggccagtgaggttggtgataatgcctgtgtaattggagagtcaacaaataggagcctaaaaacgtggaactacagttttctagcttggtagctcaacagaggagccccagactcccattcataaaaagaaggaaaatgctaatcctagtcactttctagattggcaatcgtggaaggaacaaacagcccgcatgcacacagagagcagcggtgtgctttgcgctgaccctccgctctgcaggccgagcgtcttgaagcttccttcccctcttctgaacccttctgaaccttgtctgggaactgccagcccaggaatcatcagtgctgattgcttcattcccatccacccattcaccaaaagcctacagttggtgcgtcaatgtgattcaatatcaattataaatttcattttctgcctgcctacaagccattagcttagatcaatacagtctctacccttggttaagcaatcactgagattgttgatgatttcagcagatgtagagcatggtcccaagctgcctgggtcagggagtcaaggcagcagcatcttggaccacgcctgagctagttcaggcctattttgcaaatcacttactcttctcttcaaacaaggtcatgaccaatgcaacgctcaggttgtctggggcttcaaggccagcccggtgtttttctggcgctcattgggcagtacttataccccgagtgtctaataacattacagacactggtatcttttgtgcaggagagaaacctatttgcctgtcagattgtctgatttatcttggaaagagggcaagaggagggaggggcttgagtctcctggacacaacagccttctctcttggtacatgggccttgagcagcagcagtccaaaggccatgcatgggcaagggtagaacactttggagtagatgtccttagcctatgctttaaatactctggttctgcattgattatggccagttggttagttgcttccagccctgtgggaggcactcaggacagcatctagatgcagagaaacctggttggctgaggccaaggctgagggttctcagtaaatctgcactgagagtggcctccttcgactcattcattctttgtgcccagtgcatgggaagtgccacggttcctttaaagtaatagtgggaaaggtggcctggtctttggaatcttgttatccataagtgctcagagttgatgtggggcctagcaggcatggacagggaaagcctattcctaggacatagggggcatgagtgaagtcactttctgagatatgccagctccccagtcatgtaagttcttcaagtatcaacagcgggtattactatcattgtaagcatagaaagcactggaactctcaaatatgtatccaaccccaaatgcaggtagaagatgaaggcccctgagtctgtaatatctaagaaggctatacccacccatttcccaaatatggaagtcatataaaatagcagtcaaatttgggattcttccataccaccaagtagatgatgccaggccaggtataaacttttgtacccacggccaacactgttagaatctgactctcattgccacctggggaagcagtggccaagcctatccctgattcttaccagcccatggctctgtgggcatgtgtagggagacactgtagccccgcctcctagtagcctggacaggtgtgctgggacacgcccgcccgcctgtaagggtgtggtgagggggaagtctaaggtgactcaggaagagttcttaagggaccgcgcacacgtggagaccctcttctcccttctcccttctctctggtctggctgccttgccgcccctggcccgctttggcttatgcttggttggtgttatctgaataaagaaaaccttagccatacggactgcggcatgccttccagaaaagcccatctgagagggccaggccagagtggatggtgagccctcacctggcctttttggttcctgcactgttgatggcatcctgagtccctacgggccctcccgtaggtgcttagtggattcaaatagacagctactgagagaccgtttacccccaccagtcagacacagctgtaagaccattcaccccatcagtcacagaaatagctgagagactgttcaccccaccagtcacagacacagctgaatttgggaggaacctgcttggcctttaagtcctgggtttaagctcaagatgttctgagttttctgaccttgagcatttagttccatttgctctcttcttattaccgctggtgacaggagtgaaattagagatcttcgtgtgannnnnnnnnnnnnnnnnnnnnnnnnnnnnnnnnnnnnnnnnnnnnnnnnnnnnnnnnnnnnnnnnnnnnnnnnnnnnnnnnnnnnnnnnnnnnnnnnnnnaaaaaaaaaaaaaaaagggggggggggggggggggggggggggggggggggggtggtggtgttggtgttggtgttggtggcgcacgcctttaatcccagcacttgggaggcagaggcaggtgggtctctgtgagttcaagaccagtctggtctacaagacctagttccaggacagcctccaaagccacagagaaaccctgtcttgggggaaaaaaaaaaaaaaagaaaatttttttttaaaaaaaagtcaccctgggaggacacaggaggggacttcctggagttaaggaaaatgtactgtgtgttgatctggacgacagacattggagagacatttaagacagacatttgactgtgtatcagtgcctctttatcttcagggaatgtgtctaagatcccccagaggatgcctcaaaacaccaatactactgaatcctacagcagccctgctttctcctgtgtgtacagatatctatgataaagttagtaatttctaccttctcacatagcttttctctgacatattaatgtgtttagcatcacactcctgtgtcttggagtcattattaaataaaataaggattgcttaaatacaagcatcatgttaccatggctaccaatctgatatccaagatgtcttctgagtgactaatggagagagagtacatacagctggacaccccagacagagggatgattcatgtcccaggtagaacacagtgagaagctgtgagattgtatcatgccacagtagaaaacagaagttacagctgaaatcagaaagccatgcataagttaaggtgttaaaatgagccaattctttacttctggatttttttttaatttgttttatctttgagacagggtttctctgtgtagccttggttgtcctggaactctttgtagaccagactggcctggaattcacagagacctgcatacctctgcctaccaagtgctgggactaaaggtgtgcaccaccatgccctgcaacttgtggacttttaaaaatttaatttggaccatggttgatcacagataactgaatgcacagagaaaggggagccatgtatggaagttatgtctcagaagaaaaaaattagaaataatcaaaactcctaaacaacagtttacaaatctatttacaatgtactttttggttgctgtcattcaaagatcctcagattgggagcttttatcttctctaattggactccttgggcttgccttgagccccttgctgatctggacacttctgtaatttcatattagttctggaaggtacatttagaaaacagcatattctctatgtgaggtagacgcctggacagcaatggaagacatataggcttgaggacttctgtcatagggcagaattagctatcagtagcagtgccagagcctggcctgggtgtaaggacacagtccggtgaaggatacctgtgggcttcattatttcctttaagatcctgactgtgaggtctctacacttgactgaactctggcctgtatcctgtgtcccagttagctttgtcaacttgacacagcctagagtcactggagaggaattgcctagatcaaattggcctgtgggcaagtctgtggggatagtcaggcccttactaattgtttgggaggtcctagctcactatgggtagtcccatacctaggcaggcagtcctgggttataaaagaaagctatctaaagcacagacaagtcatagtgagctaccaagcagcattccttcatggtttctactgcactcccttgactgtgaatgagttccctggtcagagataatgctaccaggaaggaatagcaaagaggttcctgccctgagctcctgctgtagctctcacaattccctctttggcacagcttaggaaactctccgctgtcttccagctcctctctgagtgagatacaggcaaagctagatgtcacatcacctgtctgatatcatttctttgtggctctactcacaggccatggatgtgatctctcctagaaacctgcagtgtatttggcctgcttgggcataggcaatagcagctcatcacggccgtgttctgcgaaggcacaccactctgaactaagcaaccagagggggctgtgaatccccaacacgctcttagaacagaaacctccaggattctgaacagttccttagtcagccagactgagtcagctggcttctggtcatccttcccaggcaacatctcaagtaatcccacaagccttgggcaggacttcagagcctgcattcctcatctgtatccttacccctagagaaagctgctttttatctttgtatagttctgtgatgcacaacaatagcttggtcacatgtacttgtggtcccacatcattataaagatgaaaaattctcaaagctagtgacatggtgacagtcataaaggctttacaaaacacattgttcatgtgtttgtggtgctgctagtattaacaaaccaattttgtgtgttgtttgtgtacttagtatctatatttctaatcaatattttagagtatactacaacttgttttttctaaacaggtgactggggactagagatcatttgctgctcttgaagaagacctgggttcagttcccagcactcatatggcagctcacaaacacctgtcattacaattccaagagacccagcacccttttctggcctctgagggcattgcagacatgtattgtacataatattctgtaaatcaggtagaagtcaatgacattaatgagcccattcagtataggctgaagtgtgtgactctgttagtttttggttgtgaacctagcctttaatggccaacccatctctctagccctgtatgtcagtttttaagagaatgtctagtgtatacaaaaaccaaaaccagaaaaaagcttatgcaacaagaatattttggtaccattttaaaagggtaaaaaaagttaaatttaaaaagtttacaaagtaaaaatgtcatgacaagccaaagttaacctatattgaagaaggaaaaatgttttttgtttaaatctagtgcccagtgatgtgcagttatgtcctgggcttctacactcactcccaagtcacttactcacccaccgcaacttccagccatgacagtccccatgcacagtaagtgccctgaacagctgtagatatttgtctttcacactgtattttattatagtttacatgactactctattgcaattgtcttcaatcatatgtaaaatgtcacataatgttgtagcccaggagaagtagcctgagccatgctgcttaggtgcccaccaagcagtatgtgagtatatgatgttggcaaatgatgatgtcacctaacaatgcatttcttagaatgtatccctgtcacagcggacacatgactatagttttttcccctagcggttaccacatttttagatagtgttcatttattgacatgtcttgctttttcctttttaagtgctatctattgactttttaactatggaagaggatcctccccccacctacacaaacacacatacaccccccacacaagcatcctcctcattgttcccatacaattatattgcaagttgcatttgatcaatatatagaactcccatcattactgccatgtgattgctagtcccctaccagcactgtgttatactatcactgtttttctccttttggatatcactctttgttttcctggagttgatcttgtttttatgtttgtttagttccctggtaagtcttgtttttacaatcttaaacactgtatcagctgcttacattcaatgtttgttcagactgtaggcactttcctcaacttcattgcattttgtaactctatagctggaggccttcagggtaatttacagaggtctgtaaacagtttgggttaaggacaagcaaaaggatttaacactagacaaacatgaatgttagttccaccatgtttgctcaggacaccattttcctctcatacctttcaaaatgacaacaaagggcacttcattttaatgtagccatgagaattaaggaattacaacaaaaatgcccacatcattgcaggaatttaacaaatataagtttactctcttgagggggaaaagtcctaaggacaaagccacagaaaagacttcatcccaaccgccagctctctcttgccaccctgaagtagcctggttctccactcttgaggctcctgggaagtcagccacagctattgcagccccactcatctgtttcttctgaagaaaggagccgcaagtttactctgaactattccaaacaaagacagaagctccaaagaaaagtaattgaaggattggtgacgtcatataaaatttgaagtgccaaattaacaaaaaaaaaccacctttaatatacaactaaagagcaactgtagactggtaagtatttgaaatatacagtcaagggtaaggatagatttccttagaacctcaatgagttaaagcagagacaagcttaaagccccataagctaatgcctctccatgactgactgattggttcacctatattgaatttaaatttaaatttatattcaatttaaaactatattccgagtgcttaccaggcactgagggcataatgttgttcgaaaagaaaaatggtctccaccctcatgaagcttatagcccagtgcaggtgacatgtttaaaagtcactctccgaaatatgtaactgccaccggaaagaaaggctgaagaacaaaggtgagctgagtatggggcagggacccacattggagtcgggtggggcaggattgccctggtgggaggagctgagggctggagggggaaaaacagttagaggagtgtacttatgtgtgaatgtgagtgtaagaggaagtccagagggaactcacggaacacagagaaacggggagaaggtcagcatatctgagacttagtgtgtgaaaggtggctggccatgagggacactcagagccattgtaagaagtgtgttgaatgattcttagtcggagggtgggggagacagctggagaagggtgcagagtataatttacattttggatgatggcttcgggcaggttagaggctatgatgactacagaggacttggcttgagaggtgtggaatgtgcagagaacagagtactttgggagacatactgcagacctgtgtgcagtggggcaggccacagcagtaactactaatgtgggatggtgttcatgagcaccaaggaagctgcattaaggctggcaaaaaccattaagacaagcctcatgacggcagtattgtagagatgcagtaattctatgaaatcagtacaagtaccacaaggcctagagagatgggaatgaaccagacctaattcttgctcatagaagggcctgatcccagtgctgcaggcaattagtactgatcgtggtgcaagctgaagaaggaacatggagggcaccagggtggtgagtgtaatgatgggcatgatggtgcagcctggtccccgaggttccttctgactgttcgaagccaccctcataactctgagggaaggggccctaccctgtgttttatttttctatcttgaaaagcaatagaagttgggcagtgagggtgcacacctttaataccagtacttgggaggcagaggcaggtggatctccatgagttcaaggccagcatggtctacagagtgagttccaggacagctaggattgttacacagagaaactctgtcttaaaatgcacactgcccccgcaaaatagcattctatttgtgtcaaacagtacacagacttgtgccctgctatggaaggttagcaaatgcaacctgttttcttctatgaaagctggcaggggcagggtaagctgtgtcttcctttccctagagtagagcagtagtggaaacatgggtcagtgggaaacaagcccactggggacagggtatcaggaaatgctccccaggaagcttagatccaggtgggaactaagtgagcaggtatagtaacacctgctttcaccggtgtgcgtgcatgcacgcttgcatgcgtgcctgtctgtctgtctgcctgactcatctgcctgtaaggttttggaagatgaacccacccagggaagaacagttggcctacttcatgctgtggttagtacggtttctatcaaaacacatggtaaagcccaatttttcaatgtgacaattctaagaggtgatggttttaggagataatagtcaccaaggcaatgtcataatgaagatattaatgtacttcccaaagagtgtgttagttatggtaaacacaggttatgatgtgcctagcacttccccttgggctccttcacacatcctgcttccacacatgttcactccagtcttctgatttttgccatgaggccctcactggcagcctagcatgagttagtaccatgttcttagacttccaaactataagccaaaaagtcttttaaattgtttcctttaaaatgtatttatttttatttttctattattgtgcatttggaggttagagtatgagttttaagggaattgcttcttcctttccaccatgtgtgtttggggaattgagtcatcaggcttggcagcaagtgtctttacctgctgagacaccttgtcatccctgcttctcttcattataaactatgcactattaagtattctgttaaagcaatacactaagacagttatacagttaggtaactgacagagaggcttttgggaaattcttaatcctgatacctcctcctacccctatccctacaaagagatgacaaggacacctttcagtgtcatggtcaccttcacctgctccttcggggttgaaacttgccaaaacattagcagctaatgtggcttccgagaagggaccccagaagcccaggtatcaacaacccagaggagcagcttttcagtcagaccccaaagccttctgaacttgttgcccaggtctgagtttattaactttcctatagaggaactctgatcttctccaagtgacacaaaacttgggcatatttccatataggcatggcctgcaagagtctagtccagacagtggctggacagaagagctgggggtttgtgttgtgaaggctcttagatggccacacagttcatgtcctagtactgaaagttttaaacaggggtgaattttgatgacaaaaattcttccatctgccagagtccaatttctttgaggtacatagatatgtatttcctaacatgctgcaagtctaacttggtccatccatccatccatccatccatccatccatccatccatccacacatacgtgtatacacatatacatatacacacacaccacacatgtacactggggaaatacatgtgatgctccccactcccatcccaggagcatgctcagcctctctctgccatcctgtccctgctcagttccctgtcattcctcatcttacagaccaggaatcatagctcactctagccacctcttggctccctgtgcacagcagctctgtgtgtaatctgtgctcgcagaatgtctctgaggggcagatctctggtcagccagtctagccaaatcagtgagctccgtgttcagtgagagacctgtctcaaagaataaaatgaagaacaatagaagaagacacctgaagttgacctctggcctccacaggtatgtgcacacgtgtacacacacacacacacacacacacacacacacacacacacacacacacgtacacatacatgtgcacacacacagtaatgaagtttggaattttacacacaggcccctttgctgaatgaagcactggtctctttccagaccaacaagattctatcaatatacaaaaggtcgaacataagcatgtaggtcatgaaaataatctagtagttgtactcaaagccagagagtggaaaaaatgggtgagattaactttaataatgggcttctttaacccaccaaaagtattgtcatttcagcaagttatccagaaattatttaacagagtcattaaaagcctgtgtgtactttcttcttcggaccagtatatgccaaatgctcattagcctcatgtgactagtggctgtgccttcagacagaagggcagggaaggaaatggcttgcttagaggggtctggcctggctaacccctggtctcagcagagccaggcgcgtctgtccgctgcttactagtggctcccacattacacaacattccaacaaactacagtggagtctgggtgccactgaacacactggaatctcgcacaagtgccttcaatgtgctaatgaaatgggtcatcctcgaggagatacaaggatccccagtccccaccctcccacacagctgcctcccaggagcatccccatgccccacccatctccaaagacccattttgatcccctgtgcttagaaggaagatcgtccccaaacactggtcatctgaaaaggttgttccatctcttcaaagacagctgtttgcatcagatgtaacctcactcctggccaagaagttgctgtctgggggaaatgtcacctcttttcctgtctggttgctgggtcctgaggttactctgctgggacacatgctgatggctgagtcctgaactagagattattatctcttgttttattggattttcagtatctgccctacccccactccaccccaccccaccccaccccacccccactgcctttctaaaagtgcatttcctcggtctttttctatcataaagataggcatgagatacattctgcctctgccccactgctggctgggctaggggtaggggctgctcccagcaggctggcctcagacttgaacagaactctgcctggttattgctaaccctggtagagtcatttcaacttttactgtgagtgaaaagcaaagttttcccccagttgccacctgtttacctataacgacagaggggctgtaaaacataaaacataggtcagaggtgctcaccatccctatgcacttaaaatagctactgccctgtgctagctcaggtatgacccccacagaaccccccaccccacccccaatctcaccagaactgcaggcacataggctcaatgcagctgctcactgtacaggtgtcacagccccagagcgccttccccacctgtaaccgggcaggacagctccttgagtgtccccgcgtttgccaggggaaacacgctgtgcgcttagaaatccgcaggaatttgtacttacccctcctggcctgtctgatcttggggctcagcatgctgcagctgcctggccagactcgctgggccgatcatgctgccatccgcttcccttttctcttctacttggccagtggctcttcatgcctagctccttcgagccccgggggccactggcgtcaccccctcggctccctctcctggctccggcttgccttggactacataaatcctgatgcattatttatccattccagaattaatttccatccaagcggaccattaaagccacaatgatgtttggtgatcaatcactggccagggcggggcccgcctggctatcgtgttcgctgggctacccattcctgaaggaggaggcggggtcttgggcctcaggggcgggcaggtgggtggggccttctgaagcccagtggagattacagttggctacaagtccccaggtcctggagatctgttaccagccagccggccaccaagagggtggaggacacacatagcactatggttggccggattagcatccctgccaagtcgagtaagagatcttcaggctagggagtggcgagaatctccagacccagcccaaggggacaggcgtctcagctcactgcctttcttggaaggagcgggcattctggcattgctcacaccctcagcaactctactagcagaaagagtcctgctgaggagatcaaccacctctttagtaaggggacagaaaccagtgtccgagcatattctagctgtaaacttaaggtttttttttttttttcctatgaagccagttcctcaaaatactacaattctgaccactgcatggtagtagctccctccttgagagtgtcctacaaacttattagattgtgactccccccttactttgtgctcttacccaccgagcctagggttgggttctttccatctgtgtcataatcctcgtcctctaaatgcctcttgttcatgttcccccatgcagccctccacagatttctatgtgagctgtatctactgagtctcaaatgtcccagtggtgtttagtcaacttcagcagctacaagggaaagagggctcctgggaaccctttgaagcggtccagaaaaggtgggggagtctagtctggggcaggggagctaagagtgagggggaagtctgcaggatgtggtaagccccacatccaggtgaatgggaggaagagtctacagagggcagtctcgttcagcttcaaacctgttctgatcttagattgctcctcagatggaggagtatgtgtcctgacatgactatgacatccaaggccttttccagtccttcatgtcttcccctctgtcccctgccttgctgctgttgcacttggccataatctacagcagttcctcctgtggtcctctgttcaggtcatacgaggtctttgtgtgtcccctttcatatgcagcccctactcccactgcctgtacctgtgcacaaacagtacccatctctggaaaccttcctcacattgcttcagctccacaggtcttgtcacgattttaacaccccctccagcccgtgacactgtcctgatcccacagttgggggagacactaagcacttttctgagcccttgcacacttttccaggactggtcttctttccctcccagcagcaagccccagtctcttggaacgctctcaaaaggatggtgtgaacagaatgggatgatagcctagtgggtaaatggcctaccatgcaagcacaaggataagaatctggatccttagagcccacataaatcctgggtaggcatggcagcctgtgtgtgttcctgatgcttgggaggtggaaatagaggagcctgggagcaagctggttagctagactagcccagttggcaagctctgggttcaagtgagagaccctgcctcaatatattaagtggagagtgattgaggaagatgccccatgtcaacctgtgccttccatacccaggtatatacatgtgtacctacacacacacacacacacacacacacacacacacacacacacaatgtatggacaggtcagaaacaccactgcacggcccctccccttaaggccaagtacaaaccagaccaggctaggacagagcctacccaggaaggatgagagaatatggaggtggacaaatcacaagttgacactgggaccatagggcaagtcccgtggccagtgacagcattttgagcaatccggaaaccatctgtgagtaatgcagcctggacaatgttcccctgagccaagggccagcaaatgccagagcctcggtccaggcagggctactcacgattgttttgcttaagaaaccacctccgggagtttttcctgtgcagctgcttctcgaggatttcaagtcattgctctcatttgcctgcttttctagccattagagaaggaggaacaaaaccacaggctctgggctcagactcagaaggctggaaagggcaggcgctgatctgattgggatcatggggtcagtgggtggagggcaaagtgactctgccattctcttgccctgaccccagattccattcctagttcttccgatgcagggttcacctgagaggggctgtggtgtctcaccacacagcagggcatgttggaagcctccagatccttccagggatatgggtgacagagggcacaagagcagggatgtgggatttgttgaatgtgaaggctttgaatgcttgtatttgaagaaacagtgttatttctctaggtctaagttgaacactaagaataggaaaaggagttactggtcagtgtggcagcagacactggtaatacccccttctgcttgtctcacagtgcagcccttacccctacttctaccctagcattgtgatgccagtggctctgctctgcatctgctactctcctgcctcacatcacttgacattttgtacttgctgctcaggaggaggcactgaaaagtgtgaagaggagtagaactctccaggaccacctgttaaaaatgcactctgttgatggactatctgctcaccaacagtcagcccagagccagggtgttttcactattgttgtctctctcccttggctgcaccctggagactttgcagaagagtgtctgtgtcccatactgcagctctccttaaccagtgcacatgcacagccatcctggggcttgtgaaattgtgacctacacacagtcagggcagggaaccactaccttagaagacaactccacatacctagggccagggttaccaagacgatctttgcctgctgccatcctaagggagctagacatcttcttgcagagaggtagccatgtcaatcattcatccagtaagaaagaaccctaagctctaatgagaaacaaatccattgcatatgtagagccactggtgctatttcacaatctgtgcactgcaccaaaatatccagtagagggaagagggagggctgggtttaagctggacaagcaagcattgagagtggcagctaggactaattttgactaagatgccacttagacggtggatcccttcttcccttttccagaagctttagatagaagcaccccttgcagaggtcaatgtgcaaacagtgctgacctggctctctagagcctgtccccagtccccagtcaccactgttccttgctgtgagcaggttgctaccctctccttaacccactcaagataatcacttctatctttccctccgcctatctctgaggctcaccccaagagagcaaatagctagtggcagttggttctccctgttccttgcccctagggtagcaagttctttcttgaaaagtgccctgtccatacatgagctctacagagcagagctcatgtgtgtcacttttaaacctctgtaaatattaagttccagactcatctaagagtctctgtctatcctgggcaagtgcctgggactcagctgcactgagtggctttcagattaagaatgaagtcattcagctgcagatccttttggtggatttctccgagaggaagtctctatcagagtgattgtgagacagggcctctaaaggaggtggggagggaggggctgggtttgtaggtacctatagctgacctacactattggtcaagctgagtcctcagcttctgtcagtttcaggttgagagaaaagagggacacatggtctctccagcacaacaaggtattcctggtggtggggcaaggatgcactgagtgttcaagtagttgtcatcattcctgaagcagggtgtggcagagattggggagggctgttgctgacatgtgctgcccagatgctaagagtaacccctgatttcacagggcttcagtgacagtctgaatgacttctcctccctggaatcaaaggtctcaaagggaggtcaaaggttatgtttgagaaataaagattcactgttttggtcagttttgcattgttgattagcaagccttgtccctactgaaaatacctgcttgaagaggagagggagggccctgagcagacggcaagagtggattgtcccagtgtcccctttgtgttcacttctctcctacagccccctaactccctattcagaccttcccctcacctggacacctctgcctgctcccatttgtctccatgccttttgtatttgtagttatctcttgctggttcccttctctaaggcagcccagtctttttcttccttggttaaaactcagttgctttctgggcagtatccagcccatcactgacttggggaaacacccagatgcctctttggaagacataaagaactgatgtgttcactgagatccacaattaataaatgggacctcctgaaactgagaagcttctgtaaggcaaaggacacagtcagcaaaacaaaacgacagcccacaaactgggaaaagatattcaccaaccccacatccgacagagatctgatctccaaaatttacaaagaaatcaataagctagtctcccaaacaccaaatatccaattaaaaagtggggtacagaactaaatagacaattctcaatagaggaatctaaaatggctgaaagacacataagaaagtgttcaacatccttagccatcagggaaatgcaaatcaaaacaactctgagataccatcttactcctgtcagaatggctaaaataaaaaacaccaatgacagtttatgctggagaggttgtggagaaagaggaacactcttccactgctggtgggagtgccaactcgtacagccactttggaaatctgtatggcgagtcctcaggaaaatgggaatcagtctacctcaagatccagcaattccactcttaggcatacacccaaaagaagcacattcctacaacaaggacagctgttcaactatgtgtatagcagcattatttgtaatagccagaacctggaaacaacctagatgcccctcaactgaagaatggatagagaaaatgtggtacatttacacaatggagtactactcagtgggaaaaaaaaaaggcaaatggatggaactagaagaaaccattctgagtgaggtaacccagtcacaaaaagacaggcattatatgtactcactcatatgtggattttagtcatagagtaaaggattgccagcctgcagcccaggctgccggagaggctggtaaacaaggaggaacctaagagagacatacatggtcccctggaaaaaggggaaagggacaagatctccttagcaaattgggagcatgggggaggggagaggggactaggagaatgagaatgggagaagaggaggggtgaggaagacatgatgggacagggaggttgagttgggggaagaacagaagagagcaagataagagataatataatagagggagacattataagttcaaagagaaatcaggcactagggaaatgtctggagagctacaaagatgacaccaactaacaatctaagcaacagaggagaggctaccttaaatgccctctcctgataatgagattgatgactagttcatatgacatagtatagccttcattcagcagctggtggaagtagaagcagacacccacagctaaactttgaactgaactgaaatccagatgcagagaaggaagactgatgagcaaaggggtccataccaggctggttaaacccacagaaacagctgacctgaacaagggagaactcttggtccctagactgacagttgggaaaccagcatggaactgatccagaccccctaaatgtgggtgtcagtgaggagaccttggaaatctatggggcctcttgtgtggatcagtacttattgctaccataggaatagacttaaggagcccatctcatatggagggatattctctgagcccagacacaagggggttggcctaggccctatcccaaagaatatgacagactttgaaggacctccatggaaggcctcaccctccagggggagcagaaagagtatgggataggtagggttttagttggggggagtggtaggggaaggggggagggagagggacttgggattgacatgtaaaataattttctttctgataaaaaataagaaagggaaaaaagaaaataaatgtagaatacatttcaaaataataaaaatcctgatataatatataccatcctatagcctttatccagcagctggtggaagtagaagcagacacccacaactaatcactgaactgaactggaatccagttgcagacaaggagtgatgagcaaaggggtccagaccaggctggtgaaacccacagaaacagctgacctgaacaacggggagctcttggtccccagactgatagctgggaaaccagcatgggactgatccagaccccctgaatgtggatttcagtgaggagacctcagaaatctacgggacctcctgtagtagttcggtacttatccctagcataggtgtggactttgggagcccaatccacatagagggacactccctgagccaagacacatgggggtgagcctaggccctatcccaaaggatatgatagactctgatgaccccctctatggaaggcctcaccctccctggggagcagaaaggatatgagacaggtagggttttagttggggggagtggtaggggagcaggggaggaagtgggaactgggattgatatgtaaaacaatcttgtttctaattcaaataaaaaataatagcaaaaaatcctgatataaaaaaataaaatttatatagtcacaataaaaaaaagttccaaacaggaaaaaatagacccagacataacttcctagtgccacagtctctcagaaatgcagctcctggatgttgcctgtgggcttgggtcagccaaagccatgtacagagtggtgcagcagggataaggcttgactcatgcagtcaaaaaaggctgcaggtgtacagtaaatcggtctggaccatggggcccagaaaatctttaaatagacacagtaaaaaacaggtatagacagtcataacagataaataaatagtttaaaataataaagtctttaaagagaataaagtaatataaatataagccatgtaaagatggtatatattataacacaaagagtttggaccttatatggtgctttattaattttgaattttctaaatcataatgaacagaaaacagcagctgctgagaaacattggattgtggaagggactactgaattaaaccaatttatatactttagaaatgtcctggcttcagaatggaagtctagaaataagctacaatgggggagagatttgttcccccttaccaggaaatgaaaagctgtagattctttccaagttaatcgagatcagttttgattgggggagaccctctgaagatcttggctgcagacatgagggaaagccaagaaagactacaggacaggtgatccttgacatgggaatagctctgagactggatgagacatgacaaatcttgttagctcatgacttattattacatgtcatcctttcatatgacaatgatggagatttatattacagtttggttgtgcaaccaaatggacttacaaagttggcagatgccttttacctgttcaaacatagaacaaaaaaatcatcttcagctgacttgtgcacactgcatattccatacttgtattaatgcatatatatatatatatatatatatatatatatatatatcctttgaatgtttatgtgttttcagtaaaaagaaccagacaccaataaaaataagtatcccaggtgaaaaaaaaaaaagaactgatctgtttggtccccagtaagcagtcagacacagcccagctaacctggatagaatcaactttctagcctgcagcagggacaaagttctgcagtgacaacagcaccctgaaacaaggggaggtgtcctacagcaggatcctggttcctctgccggcctgtgctgctagcacgtaagacctctacagccactgacacttctgttcatgttccaagccagctttaagtcccaaagagtcttgtaaacttccaataaatcccccttcttgcctttagctgctttggttgccttttcattggaaaggaagcctatgtcatacccctcagtccaagcttgcctgttcctcatctctctgaccaacacagacacacagtctcccccttgtccattctcagctgaagtcatttccttccctatttccctagttgtgctatgaacttcatctcagcctggaagccataggccatctttctagacccagcccctctagccattcattctgtttcctcaggagactcttgttgatctgcactaactgtgacttccattcacctaagggaagcctctgggtgaggttctcctaccaagctactttccttccaatctttattttatcctaatctgtttcaaaatctaactggggcttagctgtctgcatttcatctctgccagggtcaagtgtttgcatactactttccttcagctggttcccagggaccactaggctccctggcatcagctagtattctccaaagtatagtttgtacttaacattgccatgtagtctgtaccactaccactgacatgtgactaaatgatgttactgtaggtcatttatgaacatctagctaatgaattctacaagcacccttttgttcacaaaacatgcagcacagtctggtaagttcatagccttagctttgaactcaagcccagcacagttctgcatggtttcccacccattggccctgacttcctaatcattagtggagccaatgaggcaacttcagcctaatgtgtcatttttgctagtacttagaaccaaaccagtctcatggagtcacatctgtgggatctggtcttgaccacagagggacattaagtggagatgttgactggagacttggacataagaatgtcattcagaggagagtcttgtctaggcatctaactgtgacagatcactgagaagaatgtgaaaagtaaaagaagccagaaccaaactcagagaactccagtacctacacattgttagaaggaagagggaggtttggttaagaacagagaaggcagggaaaacccagacaggaggaccgggtgttgaaagagctaaaagaaggagtgtttccatgtggtggctcactgtgtggtgtgcctaggaaaaggctggcagtagaagaggacagcgtgtagaggatcccacccatggcgctgtgtaggtgtgtatgatccaagagtagattccctgtatgagtaaaggagggggctagaatttacaattaccaggaaattccaattgtgggacttcctgctccctacaaaccaagacaagacacaaagatttccaactaagattatgaatagaatatacaaaatgcatgtttaaaaatgaacagtggagttggggtaatgagggggaagtacaactaaactacatgatctacatgtcagaagtcattttctacaacggatgtaccccagtttcaaaagaaagagtaaacagatggctgggaaatgaaatgacagggatttcaaaagtctcccccttacaccggcaacaataacaacaacaaagctgtcaagagttggcaagataacattgtaaaactttaaaaattaacgataactggcaattcttaattgctgggagggcaagggccggttatcttaaagaacgtagcctctgcaaagtctaccctcctccagtggaaggccacacgtctaacaatatttgggcagcacaaattggccttgatggggtaggggaaacatgaagatgggtgagaaggaaataatggataggcgtgggaagaattggggatagagggtaggtaaatatgatcaaaacttgcatgaaatcctcaaagaactaataaaatatataataaaaattaacctaagcttacatggacggagaaacctgcactagagatcagtaggaacatctttgtgacccttgtcccgcccacactcaaggcctgtcacacttctccagctcagcaaaaatctcacagaggccttagcctccatgccagtgacaccctgcagggaatgaaaactctgctggggccttgccttgatctcactaacccaaaactctcccacgcacagcagggagcaggagcttcccctcaaatctgtcacaggcaaatgttttggtcactggagcttcaggcagtagataacaggacaaaaattagcttgatgtaaagctttggagaaactgtttggagatgagatgttttggagagaaagaattgagagaaagtctaacgcatgtttgtgccttgtaaccaaaatgcctgatagaaacaacttaagggaagaaaggtttattatggtgcctggttcccaagtgatttcagcctgtagtggggaaggcatagcggtggggcaagaggcggtggatgtttacttaaaggcaacccggaaacagagaccacagatggaaccagggtatactttcacgtcaacctactgccagactctatcccccaaagccatgatggccttcaagaaagtgctgtgagcttcaaaacaagcctgtggagaatacctcccatatgaatcataacaacaagcccaacaaggcccctgaactgtcacctccctgtggtctttaagctcttctcagcatgaggtaaagagtaaggcagagctgtcagctgagaggctgagagtggaagacatacgcaagacaccacagagactaggagaatttccacgctgtgtttaaaatctctgttcagttgccaattagcctttgagatgttgaaaaacttcaacagccacacatgacaagaaatatgcagttaaccaaattagttcagaaaagctatgacaccgatgcacaggagcagttgcaatgagcagcacccacaatcccaggaaggaaagacaaatatgagcctgagttgctacagggggatgggggtgggtgggtgggtggtgattatggcagagcacaggtggcatcttgtggtagttgtggttggtgacaccagaccttgtcagaatgcctgtgggcaggggatggctctctaacgtgtccctcagactttgttcactgcctctgtgaggaagtcaacatcccactctctgccactgggtttcatctttccaacccagactgcatttcctatttcagcatggctctcacacaggcaagatgactccactgggggtaggaggatggtgagcaaaagggtgggaatggcttaggcaagagatgatcagaggcccatctacagcaagatggggtgatggggaatatagtttatggtagagcattcggcagcatgctcagggtgccttagggacacagaagaggctatacacttgtagcctggaagctaagcagccaccagaccatctatgcctccctaaatttgggccaggccagaaatgccagtcctctatttatatttttattttattaaatttttaagtgaaaagcagaaaaagatttatttaacatggtcccattgaggaaaaaaaaaacaaagagggttcaagtactatgttgaacaggagagaatggacatccttcttcttcctgattttagtaagtgagacaaaagacccattccattttggagtgctgatatgtggttcaaatttcagtagagggcaagagctagtctcatctttaaaagagaaaaagcctttggtcctggagtggtccccaatccagggacctccagctagatgacattgcctgatcacctctggggactgtctgggtcctgttcgatcactgacaatgaggttggtattccccatctgcactcagccagcttcagtggatgctctgatgtcctttaggatggggatgcggctctctcacctagacagctagcatggacacaaagacatggggtgttggatggaaatgagagggagggatgtctagcagtagctttaactgtagttgctgtatgtccaggtctcccacttaggaagatctcttaggaaaagatgttgttccttgtacagctatgtttccagcaaccatacctatggattaagtgaacaattacattacatcaggtgaaattcaagagagcctggactgagataagagattggagtggctctggagagctgtatacttccctccagttacagcatgtggatggaatgattaagcaggccaggtatatgggcgtccaagtctgctgactcctcttcccgttcacagcactgagaagtaagggagtagcctggatgctgaagaaacctggaccacaaaccaagctcctggataacagagtccatcagggtaaggactcaccaagctcaccaaggttggtttgggcttcacataggcactgccacagtgtccataggcacttagccccgaagaggaagccaacacagcgagtccctgggactcatctctcacattgttcagaggaagtccagctgatcaaaataccacttcttgaaactaatagtggtttgggtggttttttctttctccatgagaaacagatcgttttagtactgggccatgtgaatagctctcagttactcatcttgagtcactcctgacacccaataccagctgggtcactgttcagcatggctggaccctgtccatgtccctgttccttctttaaagtggggatgtgaataccatctggcaggggtttgaggatcaaagacaagcagccatggccatcatttatttcccaggcaatatctactctagcgggggtggggtggggtggggtggtggtggtgactctcgatgagtctgcttgattcctagcaaggcgctcataggaagctcctgcatgggaggagtgagaggtgcctcccaagtctttaacatttttattttgtttgtttttattactgtgtgggggtaggtagggtggggtggttgatgcacaattttcacagcctgtggaggtcagaggacaatttgtacagttggttctctctgtccacctttatttgggctttggggacctaattcaggtcaaaaggattgtgtggtgacatggcacctgagtctctgttaatgcagcaactgtgggagaatggggtcaggttgtcagatgaatcaaccagtagaggggtgggctggagaccaagtttaacgactaatgatgagtggtttgatctggtcagtcacccctgtgatgctgccataaagtccctcaatgagggacttcagggagctttcaggttgctgaaatatggaggttctgggtatatggcatatcctgagggggtgtggcagctgctacccctccctcagccctttctctattgtttcttccatctggttgtccagagtcatatctcttatggtaactcagtgtattcttgagttttgtgagttaccctggtgaaatactgaggatagcagtgggaaccttgaatgaggagccaagaggacagaaggggttgacctaggcacccgttgttgaggggttctgaagttgaggtactcttttgagtgcgagtctatggtctatagtcccataggctgtgtgcttgctctgggtagttcatgataagaatggaactgaattgttggataccttattgatattggagaatctgatagagcaaggcagatgtccagagacagatgttatccttcaaagaagccagctcttgaggattgggcaagtgaccacaacagggtttgacgtaagcaagtgtgatgtgtggagcaggaacacagaactgtgtagagctgggcccagagcagaagtggtggctcctgtcagagtagcttcatcctcttcagaaggttaattctggatttcagtgtcctctgatatgccaaagagcatgtgataacttctgatctgatcattgcgggcacacactagcatgagcctcgggtgagtcagggtagtatagttgttcctgtctgcagctagaatggctaaggagggatgtggggcatcattcaaggcacaggcttcactgattagcaagttgtggggctagacacaaggttggctaagcctggaagaaggggccccttgtcctctacaaaaggcaccgtctgggcttggggcgcggctcttgcatgtggattacatggagagtcagccttagggaaaggatggacacagaggaaggcccagtggctgcagctggccatggctcttccctcttccttgcaatgggaaagctgatcattcttgagggtcctgggacagcaggtcctagttatccttaggctcaagacatccctgctttccatctctgcacacaatgtggctgggagtgcattgtttctgagtggtagtgtctgcctctaccaaatgtcacaattgctagtaattagtatttgctaagcacatgccacaggtcagaaacactatcctgcattacacatgtaacaaactgccttgacacttcatgtcataggggaaaatgggggcctaggagggtgcatgatacatgaaaagtcattgtctaggaggtggccaagctgacatattaaacccagcctgccagtttaagcaattctaggtggctccaccaggaggacaaggcctctagctccacagcgctgacctggctctatgggggaaacattcttccttaggaatttcttacttaaggaacaccgtcaacattgatggctggtcttactggggctgtagaaccctgcccttccttctctaacacaggacagctataacatgttcatccagccacagagctacaagcggtcagctgctgtgtgcttgtgtttctgatccaactgctccttgtccacagtgcccagaccccctcttatgtccatctcagtccacttcaaaggcctagccttccaaaagcctgcaggctcagtgagcaccaaggctctgctgaaaagtgggcacagtgacaaaggcaatacaagggcttgagttgttctgttgttcaactccgcatgccaccattcacttgtgctcctactcaaagaggagaagcatgtgtacaccagggtcctcgagatggtggaagctacttttgtctcttggaagggttgtttgcagtgttcaccactcccctacgctgcctgggaatttagagtgctctgcactcccctgtgctgtctgggagggaagtttggagtgattgacacttacctatgctgcctgaattctttctctgagcccacaacagctggcagatggcatgtcaggcccagatggggttccctgtccccagtctcctccattccactctgtggaaagtctgaaaaaggacttggtgggaggtgggaagacccaactcttaaagagcttggcttatgaccaagtggacctgggttttattcctagaatccatgtaaaaggctgggcatggaggtgtgtgctgggaaagtggagacagcaggtctttggggctttctggccatccaaattagcctatttggaatatgagggactttacctaaaaagaaaagtgggtggcttctgaggaagggcacctgaggttggtctgaacatggagcaagacacacacacacacacacacacacacacacacacacacacacacacacacacacacaccacacacacacacacacacacacacacaccacacaccacaccccccccacatgtatgcacgcaccccacgctgcagttctcagtcagagattatctcagtgtcttattgtcagaagggaactcatctgaattcaggtcttactcagcactctgtaatcattgctctttattagatattccattccccccacagctctgtaaggggtgagctagtgtagcacccttctttcacaccaagatagagagaataagatgatggagaggcatttgtgagttgacagaagtgaggcagatgcagagggtagagggcggaaggccatggccttgctgtggttttcattctccacccacctcagggatgttgtttccccagctgggatggaacagaggttaccacaggaagctgcctccctgagaaagctgctgacccagccatccactggcgccctggagggcagtgtgcctggcacagtatctgtctagacatttgctgagggttctgcctgtgctgtttcttgggcacaggttcttcagagcttttcagagctgaggcaaacaagagtgctgatctgagtccccttcgaatgcacaggatgaagttatgaaccccagtgccccagaatgtgcctgctggagactaggccttagcagaggtggttaagtgacatgaagtcacatggtgaccctcatccaacctgactgagaggggcatgaaagaacacagccatagtctcatcatagagggatggccacatgagacatggggagaggatagaacctgaagctaaggagaggggatgaaggagaaaagaggcctgccaataaatttattggtaactaagttgtccaggcatactactataccactttccaggctcagaccagacttctcagggcagacttcaccctgctcctagaccctctctctgctcaccacttcctctcacttttgtaccaggccagggtccccttgagccctccttccatgtgtatccagttcacacagtgtcctacactgggtgacaggaatatttttggcaaagcttaaatgttcatatccatgcctttggcgaagtctggcttcaccacagttatgagtttcctgttgggtgatctgactgctggcttccagtttcaggctcctcctgagtctgtgctaatgaatttgtacaccgggaaagaggtgctgggtggctatggccttcctactagaggctttcaagccttccccagagtccctgcaaggggactgttggtacagaagtggtctcctcatgccccagtgatggacttccctccttcagatcatgctccagtcacaggtctgcttcctgcctcatctccccaatataccacctccgcctcaacccttgtttaagttgtgttttgggggaatccacacttacacatggtttcactgctgcctgtctgggctctgtttcctcatggaagcattgcgtccatcttagagccgtgttcatctactgatgggagctggaaacaggacaaggtaatctcggagctacgattatcatttttagtttggttatagcataaaaggcagaaatgaagggaaaaggaaaaaatctaccttctggaactaaggagcaaatgacactgctttcccccacacagcctcagaacttgccagtggcctatagagtgttatcagaggctgggaggcagctaagttagcaaactgtttgttgcacctaacttggattcccagcactagtgtcttttttttttttttttttttaaagctggggttggtggcatgagtttggtagagacagtagactctcagaaactgactagagagcctgtctagccactgagtaccaattcacagtgagagaccctatttcaaaaaaaaaaaaaaaactgaatttttcccaaggaattacaagtgtggctgacacctcctctccctccctcatagccaattcacctaaacagcatgaagtagcagccaggcctgttatccaccagcactctactttctgcatgacttcatgagatatctctaatttaggagccccctcttttacttcccgctctctgtgtgtgtgtgtctgtgtgtctgtctgtgcaagtctgtgtctctgtgtctgctcaccatcattatgaagggcactggcttctgcaggatgatcttgcatcactcacattaaccattccatcatccaggatgaagtagttatgcagtgtttttaatcttaatcagggtctccacacggtcacctgacttgcatttgtctttccatgctattcattcattcatgcagtcacacattcactcaacagtaattaaataaacacacattatatgtgaggtataactttggtgatcagttactatgcaaacagctctaaccagttcttcttcctcccttccttatccaaagtgatgcttgcatgaccacctatggggtagcagcaaagccagaggatgggatggggcctctatcctaataggagagcagactcagggaaacccaaaatacataagtaagaggcaagacttccagctacaactgggagatgcagctataaagctaaacaaaactgacaaatgtagctacgtttgaagctaataaaatgtgtgaaaaccattagaaaaatgcttttcattgaactaattaatggctggacttttgagaaaggtcagtaccagtctatggttttcctgcttggggctcctccttgcccaaggttttcagctcagttcttagagaagttgtgccaggatggtgccatcctggagaccaggcacctggcaggaatggtccattcagttgtgagcggtcagcaacagccccactcagcagaaggcaagcagcctctgttgtcttggcagcaggaatgagggagtctgccactcttgcttggggcttacttaaattcctgctgggactgagtgcatgtacagtggaggctagagagggcctagtccccacatgcccttgtcagacttaagcctaaacaaattgctgacaagaggctcagcaggaatggagagctaaggtgaatgtaagggctacttgaactgagagaacccctggtcctcccacagacaaactggcagagggtggggccaactaccagatgattactaagtgacacagggtcagggtgacacgaggaagctgcattcaaaagtaaaggcgagaataaaatgcaagcctaacagagacactagaggcagcgaatgtgagggacggggatgcacagattcagcccaggcagttatcaggaaatgattcaacctcttatctaaggtgaccacttttagtaggtgtggctgctcacttctgactgtaatgccagcattccagatgctgagacagaaggatcacaagtctgagcccagcctgtaagaccctgtctcaaagcaaaacaaaataacaacaacaaaaacctcaacaaaaatgaatgctatagtttaattataaaaaagggccccatttgtgcagtgtttgaacatgtggttccccagctgctggccctgtcttgtaaggctgtgggacctttggacaggagctgttcttggcagatgctgggccagtgggagagaggtttcagtgccatagactagctctgcttctggtccaagcgctccatttcctgatcttttgagacaggagaagtctcaatcccaccaccatggacagagtcctggcctctgaacctttcacagtaaaatggtgaagcagacagaccttcctaccttaagttgcctctagtcaggaatttgagaaaagtggtagcataagtaacgcaaaacaccaggtcttaacaacagcaaagaggtgtatagagtcaaagggagagggggttctacaccgtcaggaattctgagttcctcagggtttggatctgagagattaaatacttaaaaaagagaattcctgccagtacactcaagaaactaaaagaaaaatgcaaagggccacagggagacgtgagtgtgatggagcaacagaattgctaagaacagaaataactgacttggaagaccattgactaaaattagccctccccctccactgcacctgtaagaatatgatagcatatgtaagggtggggtaggaggaagaataagtgtacttgagggtagaaatatgaatggggctggtggagcaggcctgtaatccccaggtactcagctacaaccaactgaaggaaaaggaacagactggtggagatatgggaaacagtggcaagcatttctgtcaatatgcttgcaatgcaagccccaggcagatggagatggacagacaggagcagaagactggaactttctaattgatggaaagtattgtttttcacatgtaataaaccaaaggagaatggagagagagagagagagagagagagagagagagagagagagagagagagagagagagagagctgcattctagcacagagatggatatggtcagatggacagatggacagtgccaaggttgatgatatgggaaaaagagatgaccaaatttgcaatgaaactgttaaaaataaaaaaggcttgaaagtaacaggaacaaatggcctggtgtcatggaggagtgcaggtgaccacgtctctcaataatgaaagctagaagtagaaggaaatattcagagtgctagaagaaaaatgaaaactgttcatcaatgctgacctacgtgaatgccaactttcaaaaatgggaaaggcaaaatggcagcctcccctgaggtacagagagaaatccttactagcagagctgtgttagaggaaacaccgaaagaagtgtccactagcaggacggcagccctggaagaaccgaggaagaccagagatgacagaaacaagggttcatggaaatattcttcagacatatgtttctgttatatatcattttatttttaatctattttaactgatacaccaaaattctacatgttaaaagatactagtgactttccatagtcagattaagttgcaatcttatcgtaccactaatgtgtgactttggggataatactcctgtgggaattcaaggaaaaacatagtcaaatctacattatttgcctacagtagtgagacctagtcacatgttctctgtaagagagccatcgcagctccaagtcacaaacagaaaggaaagagacagaaaaagacggttgaaacaaagctgttaagacagctggaactggtcacgtcactctacaatcaaacagttgccacaataggagaggaacactatgacagggctattcacagggactaagacacgaacacatcagcaagctgctatgtttgatccaaagagaccccagaccagtggtcctcaagccacctaacactgggaccctttaatacagttcctcatgctgtggtgacctcaaccataaaattactttgttgctacttaataactgtaattttgctattgttatgaattacaactcaaatatctgatattcaggatatctgatatgtgacccctatgaaagggtcatttgaccccaaaggggtcacgacccacaggttgaggaccactgccccaaaggcttaaagaacaagagacttggttcccagcctgtgctgctactgggtcttaaagaggtgggcatttagtgggaagaggttgggtcactgggggcatgttcaaaggagacagtgggtgtcttccttctgtctttatttcctggctgcagtgggtgaatagccagccctctggcacaaattcctggaaaggtactatgctgccaaggacccaaagcaaagaacaagtgactatgaccttctcttttagtaaactgattcaaaaacttagttttaaaagttttagcaacaaaaattattttgttctattttataaccgtaatgaatcgtaatgtcaatatctgatatgcaggatgtctgatatgtgactcctaaaggggttatgacccacaggctgagaaccattgggctagcatcaccagaaagcaggaacctcaactgaagaattacctagatcagattgcccttggccatatctgggagagactgacgtggttgatgattgatgctgaaaggccaagccatctgtgggtagcgcttggaaagttggtcctgggttgtgtaagaaagctcactaaacatgaggcagagaatgagccagtaagtggccttcctccatggtttctgcttcagctactggcctgagttccctcggggatgaactatgacctcaaagtgtgagccaaataaatcctttccttcccaagttgattttgtcttggacaatgacatttatgtcaactcgacacaagctagagtcatataaaaggaggacatctcaactgggaaaatgcttccacaagatccagctgtagggcattctcctaattagtggttgatgtcagaggtccattgtgggtggtgccatccctgggctaatgatcctgggttctataagaaagtaggctgagcaagccatgatgagcaagccaggaagcacattcctcatggtccctgcttcagttcctgcctctaggagttcctgtcctgacttcctttgatgatgaacagtgatatggaagtgtaagctttaagcccgttcctccccagtttgcttttggtcatggtgtttcatcacagcaatagtaaccctaactaggacagacaaagaaaggggattgcctcccaactcactctttgaagctgctgttcttctgatgtcaaagacagacaaaggattatacaaattaggactgcaacctaccattcctcatgaacacacacaacagttctgcgtagaagaaatgccagcaaagtaaattctggtaaggtgtagaaacgtaagccattactacctgagagatgtggtcccccttgtatgtctgttcatctgttaacatcaatagaatccaggacctacaccatgtgacccttctacaaggcacaaaggcatctgacagaaacaagtagcaatggcttcttactacaagggaggatccagcaggtcctctggcagaatggtgcatgaagtgatgggcgtgaggtccagcagagggatttaatccccaagaactgtatatttgcccccaatctctgtaagcatcagtcaatagtaaacttatgttccttaataatattctccaggtgtgatggctaatcttggctgtaagcttgactatatctggaatcaactaaaaccaaagcaactgtctgtgagttctctgaactggataatttgaggttagaataaccaccctacatctgggccataccttctggtggcaatccacctgaaagggcatggaagaagcaagctgctgctttttgcctgcctgccctaactctctctgacaagtttacccatcctcagaggtatctcagagtattctaataccttgctgggtttagaacccacttctttgggattttgaaataaaccagctgatactcttagactgaacaactaccagaaccttggtgtttctgctgggagacaggcagactagccaaaccacgggctgtaagctcctctaacaaataactctctctctctctctctctctctctctctctctctctctctgtgtgtgtgtgtgtgtgtgtgtgtgtgtgtgttattagttctattcctgtaaagaaccccaactaaactgagagagagagagacagagagagagacagagagacagagagaaggaggaggaggaggtggcagaggaggaagaggaggaagaggaggaggaggaggaggaggaggaggaggaggagaggaaggaggaggaggaggaggagaaggatgaggatggagaaggagggaaaaccagatcatggatggggagagagaagttgtccccactgtcccctctaatgcctcccctttctgaggccttctgtgaaacaagattgccatttcccccaaagttgcttaagagtctgagatgatcattacttaaaaccagcacagttgaaaggaagaaagcataggcacctgctataccacacatgaatctgatgacagcacgctgagtgcaataggcctggcgcagaggtacatatacacacttatcagacctgtgcagcagccaaacaagtccatgcagacagacagactggtggctctcagggctgtactcggggactgcttggtccggaggggatgacaatacttatgagcttgtctgaggttatggcaacacagcatgcctgtgaattttatactccaaaactgctaattctctgccatgtgaattttactttaatataaaaaccaatacaatcatattcatcaaatcctcatgtaacatctcctttttttcctgcacatgccctctgcaggtgggacacaatccatcatatcagacaaatctggcagctgaccctgcaacaaaagccagggcttttcatttggagcaggatgacactgtgactccagctgcaggaaaaacgcctggaggttttcagatactgtaacctcagctgccccagcccgatttctcccctgatctctgtgcattgattccactggagcttccacctagatagcccagactcagggcccagtcctggcttccagcccctcaatcctgcccctgtgcaagaggaaactttctcctcatcccatatatcaggatggcaacagcacagctggaattcaagccctgtggctcatcactttcccctgatgctggcaatgacataaaaatgtgctgaagcctggggttcacctaacacagttaagcagacatctccagaggaggttggggagttgaagagctccctcagcttctaacacaggaccagaggccccgatgatgccacagatggcatttgtttctggaattcagctctcaggtccatactaccagagaacatcacccagctacaaacacacccagctccttcctgcctggggtccaggcagtgcccacatatttgagtagggcagttccagcaagacttagcacctgaggggtacacctagccagcaccttcagggcctatcatctatatgacccagcacctgcaaggctcagcatctgcaagacccagcacctggaaggctcagcatctgcaagactcagtatctgcaaggctcagcacctgcaaggctaggcacctgcatgaccgtgaaccttctatatctacattggtgtgacccagtaccgacaagactcagctcttgaagggaccatcacctacagggcacacccaaccagcatctgcccatgactcaggcaatagtcccactgtggctaactgctttcttcccagcacttccctggggctactcaaccatcccccacatctttcggctcactgctaggctgggttatttcctggcacagacaggggagcctcaggatgcacagctctccctgtggaagctacaactagggtccaagtgggttatggacatggtggtcctcacagaatcaaatgccattagagtcctcaaccactggagtccaggacccctgacacttgctgtcatgttggagtctgtttttcaggcagacatagagcagatgctggggtacaggactgagtgctgggttaccagccagtgccgggagctgaaggaagattgagccctgaccatattctgtgtggttcccacagcccagaaaaaccaaagaggccctttcagtggccccaaacaaccccaccctcaagcaagaagtcaaacacaaaaatcattccccacacagagccaaattcttactgaagtatctggcagcgaaagttcttcttttgctggaagccgtcggcagcatctctaagctggcaatctgcagatttctcctgtatcttctctcgaaggcagcagccacatcctcaggcagacaagctaattcctggtttcagtagcaggcgatcagcatctatagtaaagaaatatatttagaatgccctttccaggcgtttgcctggatttccaacatgaagctgctgcgagggacatgtatctctgtggagccagtaccttggggatctgagagcaaacttggggaagtcactgtatcagttcctcaaatctgtaaaatgggacaagcagtgacaactgcctctcagagggaacagatgccagatgcgtcagcagaagcaagggctttgtgagccaagagctctagctgctagatttgatttttacaaggagccatggacctaagggaacacatgtggggtgacttctggttcacacactggggcttatgatctaggtgcaggggtagagcccaggaaagtcatgtcatatcctcaaggtgccacttttctcctctactttggaaatttgcccatcattacaacatcatttacaattgtggaaaactgataaaaaacaaacaaacaaacaagcaaacttggttataactagccaagtggcttttctgcagccatccacatcactcacacagcagccccaagtgacctaaagcaaagctgggatctgaggtgacaggcacagtgtcacctgtcttagtagatctgctgtatccagatgggaggacaagcccagcgtgttctcctactcgccttgtctctactctgctggcctctacaagctgagcttgtagcaggcctgaggttacaaagtgagccctggtggatctttccagcctgggctgtgagaagcagaactgtgggggaggtagggatgtgggctgtcgtcagttcatctcgatgccacaggcaacggaagcctggggctctggactagtggccagcatcctgtgggtcttgctgtgtcaaagtgcttctggatcacattttagcatttgggcacagttcctgtcactgaccagtctccaggggaaagcacctggaatggagacatagactgtcattgggattgctgagaggaggaaaccgtgggtaagcactaaatctgcaagggcctaggcccaagaagatgccagcatgaccttgggcccaggagtacagacagcccagagttcacagctgagccaggagccttcaaggttaggatagagacagttggggctagaaaattaagaccatggagctggtactaacctcagagaccctgatgtgtcgggagtgacatctcccttctgtcctagaagcactcaggcttggaaacataggtggactgaagtggtggcggggacactgatggttggggcacccccaaacccgttgtagaattaaagttctgggtccagtctttagtaggacacaaagccaggggtggtgtatgtctgtgatcccagcactcaggagatgggagcagaggatcataagttcaaggttaccctcagctacaaagcaagctcagctggactacatgagtccctatttaaaaaaaaaaaaaggaaaaacaaaaggcttaaagttaaagttgaattcatgtgttggagacatatcataacctgagtggcaggcgtggctggatccagcaggttgacacaagtccagttttctttccccttctgtttgcttctggggtctcttcccccttccttcctctccctcccactctcccctttgggtgggatcagcttcaggggctaatattgctcctcttccacccagcaggaggaaagagtagattttccagtctcagaaggaccaaggggcctctcctaaccactgttaaaacccttttccctctgggcttgttttggggccacttaccaacccccccccccgagattagatccaaaccagtgggacatgctgattggctaaaccctgatggtctctcagggaactgggcagggctgctttccacaagaacagagagggctggcagaggagagaaatgggtgctggaatagaccctgggagaccataacagggcagggctgggggctccgaaacccctatgctactgtggggatgctgtagagaggggccatctccgtgaaagagaggaagaaactgctctataccctccacctcaccttccccctaacccacctttctaagccaggttaagagcaggccacacccagccaagccaagtacagctggggcctgcctagagagtgagctggctgcctccctgaacatgactcagctctagccatggctccacaccatgctctcaacaaatcgggttgccctggactcaggccagtgaccctgtggcctacatcactctgcctgcaagcattaataacagctggcattggactgtgaaccgaacacatttacctgacaccccaaagcacccgggggagggtctcactgtggaatcgtggtgctccgagccatacagaaatttaatgtggcctaggaggggcttttaagtccatctttaaagtataaactcacagcccatggtctggaaatttttgcagacccggctgcccactcaccccgcacagggtcgctgctgggtgagagtcctgctgtgggtgcgagagtcctggctcacctgaacctcatctttgctcacctgaacctggacagcaggcttctctgcctgatcctgggggcctccttcttcagcgactggagggagcactggggttgcgggcccttcttctcaccccgtgggcgccctgcctttggtcctaccccggcctcccatgggatgagcccgctggcaggaccaggggatgcaacccaggctgaacatcgtcaggcaggatgtaggtttcctgtctcctcgctgcctctggggatgatgctctgacggcaatccttggctggcctcttaaggctgcagcaacctcagccgctgggaaagcgttctggtggaaaggctgacctctgcgggaagcgcctcgcctaggagagcctgggttctctggtttgtagctccctctagtggtgtctcgaggcgctgtcgcccatgttccgggacccaggtttttttcctggctgctgaattttgctttccttccagggtctggaggcagcttgggccggcctgtgcttctctgtaacctgaccttcctatgctgcaagaactgctggagagtcgtgtgggtttcctggggcttacacagattgatcccatcagatcaatcctcccgccttgcttcatggttagttaggtcatgagaactgcagctagaagagcccttgggtagcagaggagagataagactatctcctaagccataagtgatacggggtaggggggatttaaaagtccaggcctaggaaaaaagtagggaggtgcctgcactgtgggggcagaaagtcaccttctcccaggatgggccactccccagggctcagcagaggcactgccaggcatctactctgacttagctaacgtgataaaaggcaaggacgtgcatcattgttcttggactgcacaagtccccaacctactgggacctcactggaaaacaccccatcagggctcttttgtgcacgcaggggaaggaactcatctgttcaggtttgctggaagaggtggctggggttgcagtttgaaggaggaagagaggctgaggcgaaattgattttgagtgctgtgttgggcacaggaggctcactgactagtgttacagtctccctgagccccattccccatctgtacaatgcagataggaatatggctaaacccatggatcttctagagatcgagtgcagtaggtcacttgctaatcggacaatttgctaagtgactctctcactcctaacctagaagctatctgcaattgactcccactggcaaagggaaactcagttttttccaacggaagactcgaggtttgaaggctcaggggttgttctggttatttatactttttcttctgatgccttctgttcgcctcacttttcttttaattttactttagttgtgttttttacttgatcttattttcaaatgatttctttgggcttttgagattataatatggtcacatcatttccctcgtccctcccatatacccctccttgctctctttcaaatccacggcctctttgcctcactaattgttgttgcacacacatatgtatatacaggtttcatatattttattccccttcttacatttatctaattttacttcttacatttatctaatttttctattattaggcagccttttttgatacaggccttcacttctactatgttctttgtagcattttgactttatatgtattaacaaattctgtttatgatttttcattatctgacaatcatgagttattattttgatctcttgctctttcatcctctcccactctttatttaacttgatttcccactaccctgccccctctcttttctctcgttcttttactacttccgaattcaccatacacaattctaaatgtcaaagcacacactcttttttcctttgggcatacttttctcccccagcttggcggtacgtccatgggctctcatcagttttatgtgcatttctctatcttgtttggctgattcttactgctgtcacagcagcagttctttctctctcactggttccaaagaggaagcactagagaaggtcagtcactgagaggatccctggggaaccaggaaagagacccaaaccaacagacattcaagttacaatgcagaaacacaagtgtgaagacatagagctagttaaaatgccagacaaagaattcagaagttacttatacaaagaaccaatgagttcaaaggggatataaagtaagcagacatacaacaaagcagggaatcaacccatggcctggcgaggcaagccagtaacagggatgaacaaagttgtcttttaatattctcggaaatataaagacacatcagtatgaacacgaaccaagtcagcaatgctgaagacacccaggaaccctaagcacagaggaggaagaaaagaatatacttccagagtgggatatgagcggatgatgaactaagaaagaatttgtgtgtccaacacagtaaatcagcaaagccctaacatgattaggcaataaagaaaacaacaaataagccaaccagaatccaactaaaaccaagcaacaaacattacaagaataagaactcaaaaaattattcttaaaattattcttaataataactatgaatgcaaatggattcggctctccagggtagtagagactagctgacaaattgaaaaccatgatccagctacttgtctcctaaaaccatatccactggcacagagacccacagactgcaaccaaacctaaactacaagcaaagtgatgctgacagcaaggtggcacagtgactctcatacctgacaatgtagacttcaagtaaaaactggccagggacaaaaggccactgtcaattaataaagggaacaattcctcaagattgaatgacaattttaatatttataatgtttctaggtaccaaagtttaggcctccctattttataagacaaacatgaatggacacagagggaagatgacaggccttgaaagaaagctcaatactccattttcaagaatgaatacttcacccagactaaaagattaacaaggattttcctagttaatttgcatcatagctaacagggcttagcagacattaacagctgcagaacatacattcctcttggctgcccacgcaattcactctaaaacagatcatgttttagacaacagaggaagtcttaagtacaaaagactgaaataacttctcatatcttatcagactgtaatggaatgaaactgaaatcagtaataagagaagccaaggaactatacaattacatggagctcacacagtatgctccgaaatgaccaattggtcattgaagaaaagaaggagggaatttaaaaatttctggacaaatgaagttaaaagtacacttttcataaccaagacaggttcaagaggacgtggataacttaaacagatcagtgacaagcagcatgtttgctgctttggtagagactccgggcaaaaaaggttcaagaacaattggattcagggccatgtcctatcagacttttaaaaatcagtggataccagtgcccctcaaagacttcagaaaccagaaggggaaggaacaccactaaatccatcctaggaagctagcatcacccagtaacaaaactggatagggacacatagaaaacaaaaaccaaccaaacaaaactgtagttcaatttccctgatgacacagaggcaaaaattgtgtgtaaaatactcacaaaccaaatataggggcacattttaaggcataaatttaaggagaccatgcaccacagctaacatggcttcatgctgggaacgcaaggggttcaatatgcagaaatctaagtgtgatgcagcactcaggcagatgggagggcagaaaccacagggtcatcacacaagttgtagaaactagaaacagaccagacctgaacacaacatggcaaacctgcagccaacattatactgttgggaaaaattagaagtattttcttctaaaatcgggtgacctcttgctcaatataatgtttgaagtcttagctagagcaataaagcaataaataaaatgttataaataagaaaagaaaagcccaggcattcctgtctgccttaaagattccaccagagaacagtagacttgatatatactttcagtgaggaatcaggatacaaaatcaacatataaaaaatcagaagttgtttttaatatattgataatgatcttaccaaaaagataacaggaaaataatctcactcataatggcttcaaaacaaaaaacaaagataaagtccacctaggaagaaacgaagccaaggattcaaaaaacctctacaatggaacctttgaaacacagaagaaagaaactgaagagatggacaaacctccccatgctcattaattggcaggattaatactgtgagaatggcaagttactgaaagtgatctacagagtcaacttgatcacaatcataatccctgaggacattcttcagagaagattcacgtggaaaagcacagatgactaccccagatagccaaagcaacccaaagcaaaagagcaacattgcaggcaatgcaatacctcatctcaaattacactacagagccatagtgacaaaacaagcttggtactggcacaggacagatgcatggacagcaacagaggacccagatataaacccacacagccaaggcacctcatttttgagaaagctatttgaaatacactttggagttaagaaagcatcttcatctagtgagacctgcaagcctggatatcagtcctaagaaaaatgaagtaagatatgcatttcctgtcctacacatgaaaagcccccaaccttaatgtaagatctggaattctgaaactgctgtaggaaagcagggagagcatttcaatacgtaggcatgggtgagagctttctgaagggaacacagcagcataggaaacaatcccaagaactgataatgaattattatgtaaagcttatgcatagggagcaagcaatcagcagagggaagagacagttgacagagtgcaagaaaatcctttccagcaatgcgtttaacaggggtcaatatccagaataaagaactctaaaaactaaacaccaaatcatccaaatcagtaagaggacaagtgaattcaacagttttcaaaagaagaaaaacaagtagctgataaatatttgaaaaatgttcaacatcctcagccaccagagaaatttaaattaaaactgtttttagattccaactgaccttagtcagaatggctatcatcaggaactcacacactcgcatgctcactaaaaaataaaaataatcctgaaattatagcacatgcagggaaatgggtagatctggagattatattaagtataataagatagactcaggaagataaatagcacacacattttctctcttatgtgcataatgaatatttataaatgcacacattgcatgtacatatgcatatgaattgcagtgcatatgtaaaaaaaggaatgagaagtggtgggtgaggcgaaacacaacacttcccacctccccacatgtgcagagtgtaatagctacaaataatacagttctactctcatgtcatctgaatggcaaagagtccattttacaggggaagaaatgagggaataagttacaatgtcacacatgcataaaaacatcataacaaaactcagaacttgcatgctaactaaaaacaatattagtcatctgtgaagaaaattgtaattttctgtgaaaatttcaggaaatggatgaaatggaaagtgtaaggtgaccaaaactcagaagggaaaacaaacaaagcacaacccctgtgagctccctttgtgaaactcctcgcccacgatgtatttatgtgtaacagatgtaagtctgggtgaaacctacaaacccagaaaggagaccatcagggagtgatgctcatttgatgaaggatgggaggggacaaaagggcataggggacatgaaagaggcagtaccatggacagcctacaagaagggaacagggactccagaggagtgaggggatgggggatcacagagacacagtttattgaatatcaccataatgatatcttacaaagtatgcgtgaatttaaaaaaaaaaagttgaaaagaaaggaaaaagaaacgacggattgcctgattgtaattgacaaccatggccacaagatggcgagctcagcacgctgtttagggtgcgtagtcccccatgccgtcctccctccgctcccagtgctttggcttcgggccctaggagttcttcttagctggggagactccgtgttctgggcccatggggctagctagaaaagcacccaggtgaagcccatactgccgcaggggcaaagctggtctcagctctagtcaggacttcacagttgaagctctaataagatagactgcggcaggatgatgagaagaacatcccgcggactgacgaagtgctgttctgtccccattcgcactgggcctcagaggctacggtgggcatggccaatccgtggaagccagaagggttggagacgaaacgatatacgctttggagagtccccagtctgacactcatgctgacctgcacagcgcgaggaggtcctgggtgagccgggcagagagcagtgcgagccagtgtggctggccaagattgagctgcaatcacaccgcgctgaccaacgttgctgtgtgatgataaagaggaggacgcgtggggcagagatgcacccagtgccccagacttcatgttatgaagtgttgaggatggcacccggggcctggcacatgggagacaggtgctctaccccgagccccaaccagtgcctagggaactgtaacagagatatgtgtgccacgtgggtgtgaagcttgctactagccccgtcaaaagaggtaggagaaatcagcttcctaacggatttacgtgacacaacacacgcaaattgtcatctcaacatgccattaatataaatactgttgattgaggcgcattatatcatctttatactacatcttccaactcaggggtgtattttacatttattcattttgtatgctaaatttccatcgaaaacatctcatctctatctcgatttcacatgattttgaactgggagagaaggtttgcacgcgtcttaaccatacaaagtcactgtagcctggggcgacctagtgtttaagagcagaggatctggttccagagcccacaggagactcacaactgcctgtgactacaattcgaggggatccaatgctgccctcttctggctccggtgggcactgtactatgtggaactcagacaaacatgcatgagtctacatacgtgacaaaagaaatgaaacgacacacacagatgtacagacacaaaaacacagacacacttgtacacacacacaaaacacacacacacacacacagatatacagacacatatgcacacagacctacacacactctcaaacttgtgttcctcctgcctcagcatgtgtgagtgagattataggtgtaattacctccatgcttggcagttatatgtacttttaaagaaaaggtttaacacagactactacagagtgaacacacactcgtagccctgccatccacgcctaaatgactgtgtatacacagtgggagctgccacgccactattattgttacatttaaatatttccacaaaaaccagaaggtacacgtaggaaatggagatggtgcagcagttaggagcacttgctgcttatcctgtttttcattatttatttatatttttcaacttgatgcaagctagagttatctggaaagaggagcgtcagttgagaaaatgcccgtaccatatcgtctgtagtaagtctgtagagcgttttctttactattgattgatgctggagagcctagatgactgtgggcagtgccacccctgggctcttgtcttgggtgatataaaaaagcaggttggtagcaggacagcaatcatcacccctccacagtctcagctccagtgcttgcctccaagctcctgtcctgcttcagttcctaccctgacttccctcagcagcaatggagcgagacccgagagttgtaagatgaaataaccctttcctccccaagttgcttttggtcatgatggtttttgttgtttgcttatttttctttttcgagacagggtttctctgtagctttggagcctgtcctggaactcactctgtagaccaggttggcctagaactcacagagatccgcctgcctctgcctcctgagtgctgggattaaaggtgtgcaccaccactgcccagcttatggttatgatgttttatcatggcaatagaaaccttaactaagacattgcttttatagagagaggacccagattagttcccagcacccacattatcaacctataactctagttataactagattgtgatcaacctataactctagttccaggggatctgatgcccttttctgacagtctcaggcacgtcacacacactgggtgcattatcacttgcaggcaagcactcacacacatatagtaaaaacaaatacttttaaaaaagcaagtgtgtgtgatggttaacataaaaatgtaaggaaaaatatctttaagaaagtaaaacatttctcaaaaaatataaagtaagcacacatggtactgataattctagcactattctccattgagtagctggtgtggaaggcctctatgttgagagaggaagtgagctgttcagttgtgtgaagtatttccaagctgctgtgtagggacaacacagcagtaaacactgtgaacactgcagtgtacgtacctgtcacatgtacatacatgatggctgtccatacctgtcaggtgtgaatttgaacatggaaaaagccagaaaatgggtgtcggctataactggaaagccagcctttgctgccaagagcctgttaagctctgatggtctgagaggaagggttggaagactccactcccatgttaaattctccctgggtactgaagcagtgttcccacctgtagcacaacctacttctcagtgctgaccctgatccaaatccagggcacttggatccagtcattttcctctggagggtcacacagagcagggctgaaggacacacttgtccaccatgcagacatttgggtcaggggcctgtgtcaggccgggcagcactgggcccatatctgaaggacagaagaccccttctttgtgtgctgtgtggggttttcatggtcctctgcagcttgtggccccacttgggacactctttgctttcctggacaggtggcactttctttcagtacttctgtggacagacagacaccggtgtctctgtaacaatgcattgcaaggtttgttcctagcatgtggggttcctgaggagcggggatgtctgtccccctcacactgatctccacctacaggacacagcccatgagaaccagccttgggtcctgggggaatcaaatgagaaggtttctttgcagctcctgggtgctgagccctgaggtcacagtgtataagggacacaatctctctacaaggaggactttgggactccatactcctgagctgggagctgttgactcagttagcttgtacttcagtgtcttttcccttagggcaacttgtaaagaaggatgtgatggtcttcactgtaccagtgaggatgctgtaggatcaacagctgaagtgacacactcgggctggtctgaggagggataggagccactcaaacctggcactccaaacccagagcatgtgctcacagtcacactggagccctttaactgaatgctgtgagccgaacatctactgtaatatctgttgtggagcccgaatggctgcaaagcctgcaagtctaaaatcttctgaaatggtccccttcagtttgtcccccacaaggagagaacactcttctgcataggaatctgcctttatatataatggtagacccaatttttccatcatgtacagggacctgaggcaaatataaaaatacctgttggttctgactcatgtccttaggatggatttacaccaggagaaataaaggtggttttgttgttgttgttgttcttctcagaaatttctagaagcaaaaggctatcaaaagtgtccaagctgacagtgacatcgccacacagacaagaaggattctcaccctccacagcttctctggcagtggtgaagggcttgtttgcagaaagccaagacagttataatgaaattgcccacatttcccctcaaaacttgaagtgaacctgtgctgaggtctgagaattcaaatttgctccttgggctgatgcctcagtgaccctgaccagaaagaagaagtggcttttcctctctgtcctatcctcatgcttcagaattgggttgaggctggccatggcccagcatctcctggtgacgcccaccatgagtgaccatgttgtcatgagtcattagcgccatgctccaagggggaatggtagtgaggacgatgacttctcttgtgagaagagtcattattactctgccttcctctgagcctgtgtattctcattcccagctacagtattgttttcaacctcacaagcatcccaagatgctgagagagctacagtcagccagtcctttgaggggagaaggtctatgcggaaccactcgccccagcctcccagcctctgcttatccagcccctctgggacagtcctgtagcctctggactatgctggctctgaggaaaaagaggaagggcatttctgtttgtttcctttggctttcttgggtgatgtgatggaaaggtctgatgagtccccgagaaagtggtattcagtcagggcttgagtttttggtggtagcagaccacacagcttggcatctgtattttcaggttcacacacttcattcaacatcttcagataaaaagaactcaagagacacgtgtaccggtactgagcccaaaggcacagctttcttgacattcttctagatgagagactaacaggaatgattcacataggtttgcattgcattaggtatgaaagtcatctggaggggatttaagtgggaagttctatgtaaatcattttatagaagggaatgggacatttgcatgttttatgactactggggcttccagatctaatcactagggaagttgagggacagatctgtctgtctgtctgtgtatctaaaacaactgagtttatcataaacttactgatagagctgggaatgtggctgggtataggatgattatcagcacacacaaggctctggattcatttcccagtagaaagcgaataaataaaataaatagaaataaatgtactaatataaaggagctgcagcaattctctataaacaatgaagcatgtaggacttttcattataaattctgtgcagctgactgattcttactgctttcatttatttttgccaaactcttgtgtctaagttaaactacgatctcaatttaaccctgatttgacagacagggttgcattccaattcacactgcttacccaatgtatttgtagacatggattctgatctacaatctatcggcaaggatttggctttctcacacacattatagttattaaatggaagtcactctcacttccaactctatgtgggatggatttcactcatttgtccatggcacaagtcactgtgctgacttggatagcaattttcatttttttttttttttttgagacagggtttctctgtgactttggaggctgtcctggaactagctcttgtagaccaggctggcctcgaactcacagagatttccctgcctctgtcttctgagtgccgggattaaaggtataggccaccaccacctgaaggatagcaattttcaaaccctgaagaatatccctccaattttctgtgcttttcacattatagagtttatcgatacagaacaatttaagtttaatttattttattagcatttcttctaccttccccaaggctcagggatcattgtgaaagagggtggaaggattttaagagccagggtgtttgttttctggacacagcaggacatttgcacatgcaactgagacaacaatggcaagatctggggaagctcaaaccagacaacatttcagcatagggggaaatgggcatccagttccacgtctggctgaggacctgctggtgagtgatagctgctgggagaggaggagtcaggttgttgtcttttaatttttttaagggtgaggaccatggtgggttgaccacccttccacaaagattacacgtccaagaatatgtgggcagcgcaaatttgactccattagcttaaaaaggggactgagcacagttgtgcgggttgagaagggggaatgaatctggcaggagtggggggagggtgagtatgatcaaaatacgttgtacaaaattctcaaagaagtgataaaaatgacaagagaaagaactgaaacaaacataaaacatttctttattgatttttttcaagtcaagtgatcaaaataataaaggaagcccttgtttgtagcatttcccaattcctatggtgtaaattctcccagcatggccaattttaggcttccaactggcatcgccacatgcagcgctgggaagatgcacagcaacacctttgtgactttgttcccagtggctggacctaactatagaaacatgggccgggcgttggtggctttaatctcagcactctggaggcagaggcaggcagatctctgtgagttcgaagccagcctggtctccagagtgagtgccaggatacgccccaaagctacacagagaaatcctgtctcaaaaaaaccaaaaaaaaaaaaaaagaaattaaaaaaaagaaacatggtaacatagtaacatacaataaataattaggatgtactgcttttgttttgatctacactatttaattgcatgttcctataagttaaagtattaatgacacaggaactggatcaattatacaaaattaaattccatggatatgggctggagagatggctcagcagttcagagcatgtgctcttcttccagagaacccagcatggacttggcagctcccagctgtttgtactccagttccaggggatatgatgccctcttctggcctctggaagcactgcacacacctggtacacatacatatcagctgacaaaacactctttcccaaggcctatatgtagagcaagtagtcaacataaacagttttaaccacagtgctataaacacagcaagcaaagagaggagggggagtagctatgctgacgttcttgctggtcatagaacagatgttgtcttaactaggtatctacaagaatgaatgcaactatttaaattcatggagaagattactgaaaagacatataaaatataactaacaaaattggagagtcaattattagagaagtgaaataaaatattataaaccacatagggaccagggaaagaagaccctgtaagcctgatgattttcattttcatttttccttcccctcctctttccccctcccttcctgtcccttcccctccatttcgctccattcctctctcctcctcttccttcccctctgttcccctccatttccctgccttcccttccttctttccagggctgtgaatctcacctaaggcctgtgcataggaagaaagtgtgctcccattaaattacactccaggccagttcccttagcttttgtatttgaaatcactggttaagatgaataaaccttaaaggagatttagttactggattcacagcaaccattcctgactagtggccatttgtccaagtgaaagatggtcacaggaaaaggccaagttatttcttaagttctgacaaatggggttttgtttgccacatattaagaataatttcataaataaatcacatcaagccacactattttaaaaacaacttttactttgtccagcctggatcctgtctgccttgcactaatcccatctacagagtcttttgcttttgaccacatgcacagctgttctgaatagcctgaagtaataattaatacatctcttggccctgcacctacccctgtcagccaggaaggattgggattggttactgtgggtgcctgtcagccaggagggatggggattggctattccgggagcctgccagccaggagggattggaattggttacactggatgcctgtcagcatcacagatgcatacagtgtgccaaaaactgcccttagccatatgttatgtccttttttttttaatctctgctacttcagatttagatgtgtgaaatagatgatcagagtcttgtggtttagtggcttaaacgggcaccttcacatgaag

SEQ ID NO: 27 - DNA, 36890 bp, Cricetulus griseus
  >scaffold_19 dna:scaffold scaffold:CHOK1GS_HDv1:scaffold_19:38090598:38127487:1
gaatgtgctcaaacaggaaacactcttgagagaacagaagggggtaaacacgttcttgaaaggcagcgacacacacaacattcgaaccaacgaacatctctggaagccattattcccaagagattagcagcaaacaccacctgctgacaagagggcgggactaaatggacgctgggggatgggccagcctgaagaaacccgtaggcctgagcttcaaggcggggccaataggtagcgccagcaaaagagtgtcctcccacaactaatacgtgacggaggtacgtcagcatcccttccggtttggtaggttagagcgggaaacaaaaggagaccgagaacgcatgcgttgtgtgggtcccggattctggtgggttcttccgctcaggccaggaggaagcgcttccgggtcgctgccggctgccggttcttggcgcggtaagtgcggaaacgtggctgttgccgtctccttgctcgttctttcttcctgcttccagagaaacccggttcctttggctcgcctccctagcaactcatagtccgcttttttatgcttaacgacatcctgctcattggccgcttccttgagtctaagccccacccattacacaagttccgtcattcattggtttcacttcctgtcacccagcatttctttcagttaattggcttcaggcaggccgcgcgcatttttgcgagtagcatccctataaggacaaaatcctgtcagagacccgcccctgcctccttcctgttggtcaagctcacagtcattataatgagcaaagatgggcggtggtgggtagggttttagggtacagattctgtcagtacttttgggatgaggttgggcgctgtttgcctgtcacacggacctggggagctttgggctagggaatggcagcggctagttctgcgtggataaaattagaacaaaagctagagtagaaccgagtgtggtggctgacacacgccttaaatcccagcattcgggggctgaggcatgcggatctctgtgagtttgggactagcctgatctatatatagtgagttccacacctgccaggactacatagtgagaccctagctcattaaaaaaaagaaaacaaaaaggcggggagggacaccaatttctcctgcgctcttgctacattgctgggcatccatcccttccttgtgtgtgttctaagtgagccccacccagtgtgcaacccaaagtcaagcttacttatcactgggtcttatgagctgatggattttaattccgttccttgatgactttcctggtcatcagctttaattcacaaagttgattttatttgttctcacacattagttcatcattcattcttctgtctgtctgtctatttatccatgcttcctagtatattttatccttggttgtgtgtagtgcagattgactgtgatcagtaaaagaggtggttcacatccaaaaccttttttggatgtgatatgaaccaaaagagcaaaaaaaaaaaaaaaaatggtatgtgtgtgtgtgtgtttaaagagaactttactagatccctgctattgctaattttgtacataatcacaatgccacattccatctctggctcccagtctcttctctccttgagcagcatacaactttatccattattttattttgttgtcataataaccttgaggatgatataattgttattatccccatttttacagatgaggaaactgaggcccagagaggttaagtgtattggccaaagtcaaacagctagtaagtgatggagccaggactcaaactcaggtctgtctgttttcgagagggaagggaagtgtctctgctacctcccactccaccctacccctaaatcaaattacaactgaatcaaaacaaaacaaaacaaaacatactcacttgaccctttccctcagcttaggagccatgtccaccttgtttccttcactgttccctcgtgtgactgagacactgtggtttaatctggatcgaccctgtgtggaggagacagagctgcagcagcaggagcagcagcatcaggcctgggtgagtgaggacctagctcagcatggagatgaccttgccttatactggagatctgcttaggagaagtatttttctccgagttgtgaatagtcaagctgggtaactggaggctaaagttctcactttgtggtatcctaactgtctgagggaccataggacttcagagctagattagatgtcaagctcctgatagcttaagttcttttctataaatcacaggacttaatcattttaacttaacttcttagtgaggacctacaagatgccatattcttggctaagtatctcatttcaccctcaccagacatgaaaaaaaactgaggccaaacgactttacataagtccatcaatttaatgagcagatgacagaagaaaggggatcaaatcttcctgagaactgggggtggcagaggcgggggaagctttgattcaacatttggggatcttttaaggggtagagtaagccagtcccatgcccttgacctgctctgcgttgggccttggccctgcttttccccatactcctttgcccacagctccaaagcatcgcagagaaagacaacaacctggtacctattggcaagccagcctcagaggtgagtggctccagcggatggggcctttgtgaagcccagtagaccaggacttcattttaatttaatggccttgcttcagactcagaacaattgtggttctcagtctgggtagactgcaaaagtgggaacccaagggggggtaggcattgggcctggtactaaggtcctttgggtcatgcagcagcctcccagactcaaggtgggcagggttgggaaggaagaggctccaagtaggtcagctcttgacctcatccaggtagccctgagacctacagactctctcttgccccaccagcactacgatgatgaggaagaagaagatgatgaagatgatgaggacagtgaagaggattcagaagatgatgaggacatgcaggacatggatgagatgaatgactataatgagtcacctgatgatggagaggtcaatgaggtaggcggggtgtaggggagtgcctttgttcctaggctcctgcccctgatctaattgatggccaagggatgcagaaaccttggctctacccaggggcaggatctgggctgaggctggctgaggcccctccccacccacacccagcctcctcttcaggtggacatggaaggcaacgaacaggatcaggaccagtggatgatctaggtagacaagccaaggtggcctcagggtgattccaggccaccccagcctatcttgcatccacagcctcagcccctcagtctgcagaaccagcttgtggctgtagtgtctaaagctttcccttaggcactttctcagctgctgccaggataaggactcgtttggccctcccaggccatcagtcttcccttgaatccctagagcctgagcccatcccaccttcctggctggtacctcattccttggttgccaggtgtggtccctttcttaccctctttaataaagacacaggactgattcttttccccaatgtctattccctgtttgttggtgggacccagaggcgtccagcatctttccttggacattgggaaggggtcatttaagggatcttaagcaaacctaatggaccatgtgggccagaattggagcccaggcttctgtgattggtaattcctgtggcctagcttgtaccagatgcactacagggcctcattgtctgcagctgcctctgatcccatccagaatctgtgggagtttcacaactgggagcctctggagctctgccagccagctgtgtttttgttttatgcttagagatttttgtctgtctgtctgtctgtatgtatgtatgtatatcacatgtgtgcctgtgccatgtgagtgctgagtgctgggaactgaacccaagtcctttagatagggagtagcagccagtgctcagaactgctgagccatctttccagccccttagtgtagactgaatctcagaagaaggaaggactcacctggagggagcaatcaataacagaactaggctgagggctcaggcctcttgcttccagtccctggttttctagaaggggatcttgtaggaccaagaaggctgatagaatttgacactttgaattggtatggaggttgggggcaggcaaagttgagaagaaagccttcctaggctgaacctagcttgtgttcgacactaaacagaaaggggaaggggatattctgaggtccttgcttgagtagggttgggattgtatcagtaactatcctaggtcctggatctcagccaggtccagaataggtgagttgggctatgccatccttgatggcagggaagtctgggaggctggtgtggtggaggcggcatcgatagcggccacaactcttggtgtattgtaggaagcggggtgcaccaggaaaaagcacatggtcagccaatacagtggcatcttttgggagcagagcatgggcctccagtagctgcagatcccttaagtaataccgaggtcgatgtgccaagagcaccagatctgcccgattcagctggtgctgagctcttaggcgcgggatcacttcctctgagctgcccacaatgagctccacctgtagggaaagccatagctgaaggtgaggataaaaaggactgctttcccactccagaccccaccaggatcttgctgatttcatgccaggcactggtctaggccctcacaagtgtttcacagttcctttggcctctgaatccagtagtcagcatcaatattgtaatttccattatgtgcccttgaagaagctgaaaatcagaggacatgtgcttttcctgagctcacacaactaaatgagcaataagatttagactcagatttgttgggatatagagaacttcctcttagctgctgcttttgtaatcctgtaggaaataaaagtaaatgacttgggattgtgggagtaggagctacatgccctccagggtgccagctgcctgagtggagctgcttacttgaatgggaatctttcacaaaagaggcctggccagagcaattcctagggtaactggggagagatcagcttcggggagatgggaggctgaccatttgttcatcaaagccagccaaccggatgagtttttcagccactgctgcagtacgagggtcacgctctacagtgagaagccgactcccagggggcaaagcacgtgcaataagcagtgtagagtatccgcagtaggtgcccagctccagcacacaagcaggggccttctcttctaccagccgcatcagaatctgacctatggggcaaggtagctgttgtagaagacatccaaaacatgtgtgcccagaatcaaacatgctgttgtgccttcttcatgttgtatttataaacgaggctgactgccctttcccacacctatctccatccacctgggctacttgaatccaagcattctagattcagtttaaatatcccttcctccaggagggcccaggcaaaaactaccaccctatcttccaaattcctgagacattttcagtttcatactgaaacccctgcactcccttattgctcattgtctttttgattttggaataggataaatctctattttgggggggggggtgtttcaagacagggtctttctgtggctttggatggataaatctcttaatacttagaagtgctgtgctgtctaggcagacagctatcctgaattggatgtggaactctctttggtaggaaaggaagtctagaacagataattacaaaggtctgagttatgattattcccgtgttatcctctctttgaggccagcatttgtgactggtccaccctctgtgacctctacctcctccctcagtacctggtatgaaagagtgacaataaatgtctgctggataattgaataacctggtctaggctcctcatttccaaatgaaaagataaagtcttaaacacagtcatgaaacttcctatttacccagtaaagcagtggataatgccagattttcttcaccatcttgggattatttttcacacagaaggctagtgaaggggacactgacctttaacagggcccatgtggttcaagtactcgcagcagctgctccaatggtctagagtggtgaggatgtgaccaggatctccaggcagggcatgggtgagcacgtagctgaaggcccgttcctcaattcgaagtcctgacaggcagtccctgaagcttctcagcaggactgtacgcaccagcagtcggaaatggtgccggtatctcaccagcagggtcaccacaagtggcaggaatgccagtgcaatggcaggggacattgtccctatctgggtcctaggatagagggaggctgggagagaaacctacatgtaccatttgcttgtcgttgtgcagtctttaacagttgcaataaccatgcttacccaaaccatggctgaggggctaacttgccagacatagcagaactggagtttgaaccctgaatgtgcatcttccaattgtgtgctgcctgtgtttagcacccaactacaactatatctctttctggtcctgactgtggatccatttctatattgttccccaaacccacccactttttcacatccttaatatctctcttcagggctgttttcatcagtttcttaggatatcttcctcccaccatactctgatccattacagtgtagccaaagagaaaagctttccaggcgttggtggcacatacctttaatcccagcatgggaggcagaggcaggtagatctctgtgagtttgaggccaacctggtctccagagctatttctagtacagccagggctatacagaaaccctgtgtctaaaaaacaaacaaaaaacagaaaatagagaagttttgtcatcaaaccgcttcagactctcactatgctctgcttcagtaaaagatatcaaaacattatgcctaaaaaacaacaataacaacaaaaaagcatactatgcctggggctggagagatggcttggtggttaaaagcacttgttgctctcaaagaggaccttggttcagtaccagtactcacatagtggttcacaaacatctataaccccagtcacaggagatccaaccccctcttctgacctccaagggctcatacagtggtgaacatgaatataagcaaaacataaaatcttaacagcaaataccaaaaacaaacaaagacattggagaggtggctcaatggttaagagcactgactgctcttcaaaagccctgggtttgattctcagcacccacattgggttgctcacaactgtaactccagtcccaggggacttttaaaaataaatcttttttaaaaaatcttttaaaaataaaaatactatctatggtattttggtgcacagttgtataatcccatcatgaatgccaagtttgaagccaaactgggcaacctgtctcaaaaataaattcaccctctataacacgttaggctggagtgcgtcttttctatccaagggctcttgtctgctcttctcatgaggtgttttctgtgtattttctccactcctgtctcttttgtattcccctctactaagaattcaatttataagtgaaacacacacatactacactctcataccattgagcttacatctccaggaacacctatagaggctagctgtcctttttttctcccactgtccccctacccagatctgaccttggcaggctgtttttgcaagatccttggttagaagggggaatgtatgctaaaatttagagtatttgaatgaatattaaagaggtttgcgatgtgggcatgaattagtgtgcttgggaacccacaaggccctgcttacctgggctgaaggctcctaggaaagaccagagtaccggaatgggaagtccttgagaggaataaccctgaaggaggaggctggacctgatttcaattattgatgctgaggctattgttacctgagacctgcagtttcaggttaccagacccagggacaaacttcagctgccttttttttttttttttcccaggaatcctagagaaacttagcagaactctagggtcttgatttgaagaattaatgtcactagatttggtgactactccaaccccttgagatcagaatatgggtcaagacacaagccaaaataagtgggactcatttgctcagttcaaaatccaagtttttctgtaagtaaatgttagggcataggtcacagagaagagttatactctgtccctgtcttccagtggctcacatttggtagaagagatgaagtcagcaactcaatacaatagaatacgatgtgatcatgagactagggattccactgctatggcgactttgagctgttttctgattagctacctatccaaattgaacactggagtggtatactgtagatagtaaatatttgttgtttctttttttaaaaaagtatttatatatttctacagtgttctgcctgcacatcggaagagggcaccagatctcattatagatggttgtgagtcccatgtggttgctgggaattgaactcaggacctctggaagagcagccagtgctcttaacctatgagccatctgtccagcccttgaagtttatttttaatatatatgtattcatgtttttggtctgcttgtgtgtctgtgcaccgtgtatgtgtctgcatcgtttatcctggaactggagttatagatgattgtgagccaccatatgggtgctgggaattgaactggggtcctctgaaggagcagcagccaatgctccaaataaccgagtcatctctggcctcaacatttgctaatttaattaagtgaagagattgaggggatcggaataggatcagaaaaggcaaacaggaagataaagtttgtatttggactttgaagactgtaatctctgatttggagggacgagtgtgtgccatctgcctgcgaaggcagaattcaccttaatcaagaaactgccaaataaggaacttacagaaatggctcagtggctacaagccggctgccagaaagcctgacaacttgacttcaatccctacgaaccatatagtggaaggagacaaccaacttccacaagttgttctgtgtcctccacatgtgcaccatgacacacgagttcacactcatatgcgtactcaaaataaataaaaatgtagttttgccaggcatagtgaaatacgccttgaatcctagcacttggaaggcagaggcaagtggctctctaaattcgaggctagcctggtctacacagcgaatttcaggccagccaggttacatagtgagacctttctcggtctctcggggacacacacacacacacacacacacacacacacacacacacacacactctggcaaacagcacacacacacacacacacacacacacacacacacacacacgcaaatagctcccgaagtgaagcacatcccactcaactccaccatgctactcgcccctcgcgagacactgaagaatttatcttgatagatcttgggttcacaaaggtggccttgacaccatgtgatcacactttggctagaggatcaaaggattcagatctagagactgggacaacaaaatcatgtgactcgtctcccggatcacgtgccacgcgtcctgtcacgtaggtcgggcttttccattggttggcgatggtcacgcggaggggcgggaccggaagccgagatttggctgtggggccagagaggctttgggacaggctaggcgggggaagggagcgggaggccgccgcgggtcatgtgaccggaaagactcctgacggacgccgtccctcctcggcgccgcctgagcgcccggcccgaccccgccatggggtgctgctatagcagcgaaaacgaggactcggaccaggtgcggccgcggcaggcggggtttgggactgtgggctacgaccgcgggacccggggcccagaaaaagcccgcagcggctgggagctggattgcaggctcaccgagtacggaggcctggaggggacagattacggagaggacgccaagccgtgctcctaccctcttaaagatcctagtcttactccagcctggggttacgctggccgccgcctcactcggcccctccccttccatttttccagtaccctcgtactttcacagcttgactcttcagactgggtgcctgggaagcaatcgctttcctagattcctttgccttcactgctgattgtataagtgtactttacgaacccattctagagataggtaatttgaggctcttagtctcccaaggtaaatcagaaatttgtgtatattctgttactggtgttagaggtgtaatgtcactactggcctggtgtcggaggcctctggaagttggtggcatttgaattgggcagtgaagaatttgagtgaggacatcagaactttaggggagcaatagagtttagctttgaccgatatggaggaaagagggtataggaagctcattttggtttggtttgctgttccctgactgtgcctgaaggttcctctaactagagtgcatcctgaaaaatgtgactgtagagttattcctttcgagaaaacatttccttggagagacttacagtgttttacattttaaattttccaacttctccttggtgcattcttattgctttccacaccacatcccctaccctccctgaccacttttgaggaggggaaacttgcaaggctgggtcccaggccactggccatacctcaaagcctaagttctgctttctacacacagtaggcactgagccacaaagaacagtttcacccagcctagtgaatacagtcagggaaataaatagtatcactgtacctggaaagttgttctttccctatgaaggtactttgggttaagaactgcagttcaggaaaatgtgatttgtatggcaggctgagtggttcctgattctcaaaaacattatttgacctgagtttgacatgccttgtggcaagaatctttcccttcattctggcctgctaaaagaaagaacagcaaaaaataggaactcaccacaaaacatcaaaaaaataaaaataaaaaggagagggcattattcctgcctaatgacagagttgaatcggaatggaactagtgtctcttacagcatgtggtctagtatgggaaaaggatacctacttccaggagggagagctcgccttgcttctctcctgaaattcctccttctccttgattcttatttcttgccgaaacagggtcttatgtagcccagattggcaaacttgctatgtaattaatgaccttgaacttctgagtttcctgcttctgcctgagtgctgggatcacaggcattatctatgtgtcatctatgtctagtgtatgtagtagtggaaatcaaagccagaactttatgcttgctgggcatgtactgtactaatagggtcatagccccagcctcctctttaagtaggccctcctattttcactattgtctgtccttttattataaaaagccagccatccctgttggcttacatttataatcacaacagtttatgaaagctgaagtggagaactgcttccaagtttgtggccagtctggctacatagtgaatttggggccagttctgaggtgtacaatgagcctgtgtttcaaagaaaaagagaaatttacaaacatggttttcagagggcttttacatttacctgttataaattaacatatgtttaaagctgaggaaaaagttcagaggatctaagatttggcaaacattagaagtgctctagccaagttgtttccaagcacaagacatatgctttatgtactgggagaagctccgatgtagtcagttgtgggtctgtgctaaagtagataaatcttgactcaggttgtattggcttgggaagcaaactttctcttaaattatttatttatttatttatttatttatttattttgagacaaggtttctctgtggctttggaggctgtcctggaactagttcttgtagaccaggctggtctcaaactcacagagatccacctgcctctgcctcccgagtgctgggattaaaggtgtatgccaccactgcccggcaaataatttattttttatgtgcattggtgttttgcctgcatgtctgtgtgagggtgtcagatcccctggaactggagttacagacagttgttgagctgccatgtgggtactgagaattgaacgcagaccctttgtaagagcagctggtggtgctcttaaactgctgagccatctctccagtcccagaggcaaactttgatatgacagacttaccccatgtactactcattgtttgggtatcaggtgatgtcattaactttttttgctggcaggtgactatgtagccttgactggcctggaacttgctatgtagaccaggctggttttaattcagagatcttttttgccttctgagttctgagattaaagatgcgcaccactactcttgcctcagtttgtatgctatttggagttgcttggcctttcaggaaattcgtaagacaaccttgttcttgaacccctgattggggtcctgcaggaagataggaatggggctgggaaaagcaggcatagaaagcattgtgggtctcattgtgagccagcttttcttaaagatcctttcatctttggcaagcattttatcttcctagcctgttaatactgagaaaggagaaaggttgtctgggaacctggaggtaatggggcagaaggccatagctgcttccttttgccagggtgaactgggtcaaatggcctgaggaggaagaccaaggtggaaaggcagagcctgtctggggtggggcaggcaagacaggaggaagtagctctctgtaaggagagttgtgggcaagggagctggctcctgcagcagggaactggtaggaactgagacaggctgtgagcagagtactgagattggcagttggcccctgaaatttgatgggtcagcattggctagcattctcctccttcttcatattgtattccgtcagaagtggccttgtcctagctctctacagtctacttatccagattgcacctgacacaaaaccaggagggatctgcagctcgtggactcaaggcagtgttgagcctagaaagcagtagattagaacaaggtctgaaccaggacaaggaaaataattatagaagttggagacttggtttaatcctagattgctcctggtggttgtagttgtctatataggctaatagcagggctgctaaagtctgaagaggctgtgatgagtaaagagtctagtttggcaaggaggaacagctccactgttcctctgaggtcagcatataccaggtatcaggctataggagggtgaatacctgagagcagaaaagaacacccaaaacatacctgtaatctcagcactgggggaggtagaggctgggcactggcaagttccaggccagcttggttatgtagtaccaaggtagcctggggaaatggaaagacactgtgtgttgtgtttcttgtggctttataaagatcctggagagaaagaaagaaaagaaaagataggatattggtggtggtgtctctctgtgtgggcttggagtttctgcactatggtaatgtgaggaatggcaagatacaatgggcctgctttctcttgggatccagggcctcgtctgtccccaccagggcctcgcaatgttggggaccaatatccttgctgggaagtgctttgttcagggaaccaagaaggctgttcttgggttctgacttgccttcatttctcctctgcacctttatttttggtactttcccactttcccacttaccctaactttgtttccaacagtctttgtacaataggtgtttgaccagttcactgaggttccaggactgttggtgaatgcctgctttgttcctctctgaatttttcaggttctctaggttcatcctagaccaccagctttgggtcagtcagagactgaatctggacactttaggttatctttttttgttgttttttcgagacagggtttctctgtatagcttttgagcctatcctggcactctctctggagaccaggctgtcctcgaactcacagagatccgcctgcctcttgcctcccgagtgctaggattaaaggattgcaccaccaacacccggcactttgggttatctttataaaaatagtttcaatatttaaaggtcagagctggtctgaggagagggcctgtgaaaatgaatgaaggttagacttcaggtcttgggactgatttttctctgtgtcctaggatcgggaggagcggaagctgttgctggaccccagtagcacccccaccaaagccctcaatggagccgaacccaattaccacagcctaccttcagctcgcacagatgagcaggcccttctttcttccatccttgccaagacagctaggtgagtgtcacaggaccaggctagggcagaggcagccaaggttggagcatagggaataggacaaggtcactagggagagatgcctctgggttcttccctgttacactggcaggtgggagtactagtgtcaggtagccttggacttggcacctagcactgattcttgcctgtgccccgtcatgtcttctctgcttcttctcttcaaagcaacatcattgatgtgtctgctgcagactcccagggcatggagcagcatgagtacatggaccgggcaaggcagtacaggtgagcacagggccagcctccttcctagtcattcctttctagctttggagtctggttccctgtccaggatcttcatttgggtgcagcccagaagacttgactgcagatcacttaggtgcctcaggcattcaagtcagccctgtctgcccagtatgtttgatcaagggtgatgagaccaaaggaatacagtcaagtgagattgagatgagctgtacactgccaccatgttcccctggcctgagggagtgaggcttgcctgggcagggcagggcagggcaagctttggcctaattgtccttccatgaccctccccccttggccagtacccgcttggctgtgcttagcagcagtctgacccattggaagaagctgccaccgctgccatctctgaccagccagccccatcaagtgctggccagcgagcccatccccttctctgacttgcagcaggtgagcactcctggcctgtcctttgcccccttccaaactgcttcacagatagaagtgagcctggcatttggtgagcccaggttattcccaccttgttctcttagtttgaaagccttcttagttcttctccataccctttactttcccagcatctgcctttgtttttatctgccttcccccctctctcctttcctccctccctgataaaatccaggactttgtgcatgctaggcaagggttaacccttattttttgagagaaggactcactgttttagcccaggctggcattgagcttgtaaccctcctgatttagcctcctgggtagtaggattacaggcaagcaccactacacccagatctttttggctttcagtccttcatcaaacctttcctttattgttatttcatctcccactttcccagctctccctctcatgtctgttcttttcctccctggctcctctgtctcaggtctccaggatagctgcttatgcctacagtgcactttctcagatccgtgtggacgcgaaagaagagctggttgtacagtttgggatcccatgaagagaggggtcctgggacagctcttccctcctcttcgtcccgtctccaccccacctcttctggcccccagcctcactgtggctttctacagtacttaacctgctactaatcacggagaagaatgtggaggaaaagaataaggctagaagcctgagcaagtgaggactgagcgcaagggaggggagaaccgatcgccattggccttcaagtcctggctggggtgaggttggggccaagaggactgggcctggcagattttcatagtcatcgggaaaatggagataccactgtaggggtgaacaccgggagacctaggggatccccccttcccaccctctctcttggcctccaattcactcctgtcccattccctcatttggtgctcataggcacctcactagggattatgaccagggtctagatgagcttgaatctgaattgagtttgtatttctagtgccctgggtttttacatgtttggtctttttgtttttgtttgtcacccctcgataaaggaagtatattcagttgtgttgctggctcagcctgctctgtcgtgcctaccactccactatttatttttggctgttcaagtttgtgatcagtgagatgcagaggaatgtcttcagcagcattaaagaggaatccaggagataaaaattcagggttgccaggtcttagctgatgcagtgtggggtaacctcaggtaggatgagactattcattttcccttatctattgatgataacactgtcagagcactattggagaccttgtctcaggctcagtaggcttacagacagtctctagggataggaggaggtcatactctgctggtcattcttttcaggaaattaatttttttgttgttgttaagacagggtctcactctgtagttttggctgtcctagaactcactgtgtagaccaggctggccttgaactcacagagatccaattgtctctgcttccagtgttgggattaaagacgtgtgcaccaggctgggaaatgaaatcttaactagaatcacaacctgagagtaaaactaatccgctctaataaaaatagaccaaagctattttctggccctggtctggaggctgaaggtagctcctcacaccttagcactttatgaagattttcagtgaggcatggtggtttattcctgtaataccagcactcaggaggctgaggcaagaggatgctacaaggtcaaggccagcctgggctagaattagaatctctttaaaaaaaaaaaaaaaaaggttttggaaattgctaagctaatctaattcttatgatatctgaagggttaaagagtacaaagggggtccagtgaggatagaagagtttcctacatggtagcaccaggctcctgggtcctaggctagtaggcaggtctttgcctccactgtgaagttttactggtagttgctgggtgtggagacatccttacaaggtacaggggactttaatctgctgaacagctcaaatcatttattgtcaaacaagctgatcattttcagggcactgggtgtgctggggtcctgccaatctcagagtgcatcctgcttgacccggaccttcttgggcttgatgttcatgcgtttccagacttcggctgtggtgcggtctgccttggtgattccactgaagtcgaacgtggtgatacggggcaggttgcacagcacatactgcctgtgagggagacttgtgctggggcgagcccccatatagatctccctcccccctaccagttgctgctatctctgaactgacagcaaggaatgtaggagagcgtggctgtgatttgggaagactgggttcattctgagatcaaggggagtgcttagaggtctgccacttcctcttgtggtccacatgtgacagaagaatggtcttgaatttcttgtctcctctccccttgttgttccttagggagcctcttctggctcccagctccaggtacttacctgtaccccttttcttcctctatggggttcccatggagggtcaggctccggagacgagggagcacagatagcttattcacctcccctaggcgatggatgctgttgccatgaaggtagaggacacttaggttgaagaatgttgttaggacctgtttgggcagaaatcaaaagtcaggctggacaaagactggatctctgctcagatagactatctggcagagaaagtaaagtctggtaaagtctggagaacaacttgccccctcccccccacagcattctttttttttttttagttttgaatcaagacaggggttacatggattctctatagctttggaactagttcttgtagaccaggctggtctcgaactcagagatccacctgcctctgcctcccgagtgctgggattaaaggcatgtgccaccactgcccagctccctcacaaccattctagatgactctactttgcttttattacatttaaaaaattatgtgtatggatgttttgtgtatatgtatgtatgtacacaccacaagcatgcctagggcttgtggaggccattggattccctggaactggatttacagatagttgtaagctaccatcatgtgggtgccaggaattgaacctaggtcctttgaatggcagcaaagggtcttaactgctgagccatctttctagcccttattttatatgtatgagtgccagcatgtacatctgtgccccacataagagcctgatgaaagtcagaagagggcattaggtacccaggaagtggaattatatgggtggttgtgaaccatcatgtatgtgctaggaactgaacctgggtcctcttgaaagaaataaatgctcttaacagagttaggaacaaaatctaatatagagttggcatccagctggtcaggtgacagcttctcctcctgagacttaacttgatcctgaaggcctttctaactgaactgtaatggcccatgagtccgcctgcaggggagttatcagctcgccacataagctttgaagatcttatctgagttcatatcattgtatattgcaggggaatggtctccaagccatgctccaaacctttccccttccaatagggatcttgggcaagaaggggcctaaatgtttccttttccattttttttccttccttgtttgcttccttttctatcttctttccttctcctttctctcgtagtccaggatggcctcaagctcactatgtagctgaggatgaccttgaactcgtcttcctacctccaccttccaagtgctacaattacaagcaagcaccaacatacttggccaaactatgtttttaaaacttagatttcagccgggcagtgatggtgcacacctttaattccagcacttgggaggcagaagcaggaggatttctgtgagttcgaggccagcctggtctaaagagtgagttccaggacaggctccaaagctacacagagaaaccctgtctcaaaatcaaaaaacaaaacacctcagattgtacagaaagtaactgatatacttttctaatacctcttccttagtggagctcagcacaaagcacagttaagttcataacgatgcctgctatagttttgtcccagtcactgataggcaaattggttctcacacatggttatggcatcttatccccataggaagactgaagaaggttttttgttttgtttttttttttttggtttttcaagacagggtttctctgtattgctttggagcctgtcctggaacacactctgtagagcaggctggcctcgaactcacagagatctgcctgcctctgcctcctgagtgctgtgcccccaactcctggcttggaagactgaagttttaagaaactatgtagctagtgagactccaggaggcagaagcaggtggatctctataagtaaaggccagcctggtctacatagtgagttctaggccaactagggatacatagtgagagtgtctcaaaaaaaaaaaaaaaaaaaagatatttacaagtcacataataagggggaaactaaagagttgtgcctacatctatgtatctctgcaactatgtcctttgaactgcatggaattgcctatgcttccttgataagtgaggaaaaaggctgtggctggacacagtggcttcaaactgcccctagtctagatgtccacggataggaactcacagggtcaatggaagtcaggtcattgaaggagaggtcaatccaggccaggttctctgggtgctgcagaagcagtgaaaccacctggctgaagtctttcagatcattgaggacattgttgttgagccacagggactgggtcattgactttcctgacttggtgtgcttcactggtcgtagacctgtccttggctcctcgcttaccagatctatgatgacaaaataagacttgagatcattcattcacttatttatttagatctttaagttttatttgtatgaggtttttgcctgtatatatgtacactgtgtgcatgcctggtgtctgcagaagtcagaagagtgtaagatcccctagaactggagttagaggtggttgtgatctactatgtgggaattaggaattgaatttggtacctctataggagcaacaagtgctcttaacctctaagtcatcactctagcccaaggcttgggtttatcatctttgcttttctacctttagggagtgaggagggagatctggaaagatgaacatacaagtgctactactttgaggccttggcagggcctcagcaccagagtctagtgagaccctccctgcctcaagctccaaagatcagagtaagtttagagtaagggctaaagaattttaggccagatggctttctcacatctattggattactggattctgtgtataccacccctgttagtggaccagacttttcccactttacaaatcaggaaagtaagaactagagttgttggcgtaaaccaagatgacatcacaaaatgcagaatcctcatctcatatagcttacagaattcacttcattggagcacatccagtgtccgtcactcctccactacttacaagctttatcagatagtagatgcacaatagtaagcaatgagagagaacatgccaggctttggatgagcaatagggcagagatgaagcatatgtgtctcagaggaatttctgggggcagggtagaaacaaactggcgatgagggttatgtgataaccaaagtgattgtagcagggaaatggtcttggtgctctgaaagcacagggaaggcaaaatctgagctgaacttggtagattaagagacggtaactaggcaaagaaggggagaaaggatgagaacaacatgagcaaagatacaagaagacaggctggagacacatgtccaccagtaccacacacaagggcacaagtagaaaaaaagcagatgggagccagtccttagtcctaaatgccaggctaagctcttgggcttttttctgtaggtaatgagaagtcacgggagtgtttaagacagagataattcagctaaatgctggtggtgcacacctctgatcccagcgtttgggaggcagatctctgtgaatttaaagccagcctgatttacaaaaagtttcatgacagccagggttgttatacagagaaaacctgtttcaaacaaacaaacaaacaaaacaaaaacaaaacccactagagggttggagaaatggctcagaggccaagagcactggctggtcttccagaggacctgggttcaattcccagcactcacatggaagctcacaactctgtgtaattccagttccagggtacccaacacccttacacagacataaatgcagtcaaaacaccaatgcacattaaaaaacaaaaaacccaccagagataattcagcttttcaaaactcgtgactttgaagcttctatgaagcatacggatgtagaaggtagatcattcaaagatcagtttttctacttttacatgagaggcgatggacagcaatgatcatgatttggctttataaaggtggtgcccagctttttgtttgggctctattagctaatgaagaatttcaggagaaattggattggaaagttgatgagtttaggcttggatttgatgtgttagaggttcctattgtatgaagaggcaagagaagccagctaggcaggtaggcattagaatgaaggtctaaagccaaggaaacaacctcacaaacgtttagtacagggtatatcagttggggaaacaggcagttccccagagaggaagaaaaagacatttaaaaagttagtaaataatctgaagaacagggagatgcggagagaatggttttatttatttttatttttttaaaaaattatgtgtatgggtattttgcctgcatgtttgtgtgccatgcctagtaaggccagaagaggtcatcagatccttgagaattagaattccagatgtttgtgaaccatgtggtgctgggaatcaaactcaagattctttggaagagcagccagtgcccttacctgctaagccatccctcaagcccctgaaggaatactttaaaggtgtttggagaatctgcagtatatggaggagtaagttccaggagaaacaagaattcaatactaattctggcagctcagaagtagctggtaaccatgtaaaggcttgaggacagaagccaaattggagtgaaaatgaatagcaagttcaagcaggtagcctgaacatccacattggaaagtgagggtgctgtctttttcaaataaggatcataatgaggatgggtgggctggctctgctcaagctggcctcagtaggagacccagagccagactgcagtttagttaacgtggttctatttcccttctgccgccaagcctctagcaagtcttaagtggcctgtagggagaaagcacttagcactctctccacaccccagctgaccacttcatctcagctgcaggttagtcagcacccaccaggtggctctctgcactagtcttggaatgaacaggacccaaggctgagccctagtgggtagagggagcataaggaaatggagcagagcatttctgttcatgagtagactccaattcctgtctccctctcacaccttccaaaaactttcaaaggatttgacttagatgagtaataatgtcagagtaactacacatgaactaacatctgttctgataatgcagaagctcaggggcatgtcacataaaagactggtcccacactgtgagggaacctggatggacttgccttaatgtgaggcagcctgagctcctgttacctagggtaaaaggaggcatctagaattgttgtaggtacctgtcccttcacattagcaagctactggttgtgcatgggatgagcttatgtttggtaatactcctgaagcttctgcctgaccagggagtccaaattacatgtcttataaagtcactggtatctcagattctgtggtacgctttgattaattcagcaaatactgtcccaagacaccccccccccaaactctagggaacagaaagaactctggctttaatgtttttccctctaccattccttaaaagacttagcaaggcatacaactgcttggtgtatatatctctacatatatgtaaatactgcttaataaataatagttcagctgggcagaggccgtggcacatgtctttaatcccagctcttgagaggcagaagcaggtggatccctgtgagtttgaggacaggacaaccagggctacacagagaagccctgcttgaaaaccaccaccaataataattaaaaggagctcagtaagttctgaactgctggatggagtgtgtagcatctgcaaattctattttgtgctgttccttgggtagaactgactagtgtatcccctcattccaaggagtccacaaagagcagagtcagatcttcccactgaaagttggaaattcctatgcagtagtaggagccattacacacccccaatcatttttgctttcatgcacaaagctattattgtaactgaaatgcttttgaaatatgtattacatcagtcagaagtaaggtaaagcatcataaaaaggtcatggtagatgagcgcatgttggagagagagagacatgagataccaatgtgttggacactaactgaagtagtgccctgaaccaaaacccaggctagtaatactcctgagctaacgggtggctatctgatggaaaacccaagccagacagtaaatccgagatagtgagtttgtatatgtgttttgtgaggtcagtaaccaaaggcagaggtggcagaactgcctacttgagcatatagtactgtgaaagcttcgtcatgtagcatgaaaggggttagctgcctgtttaggaagacactgaatagtaaacagagactgggtgtgggcagagctgggactgcactgaatgtcagtgatgatggaataaacttggcatgtatggaatgaatggatatttgtcaaaaatgttaactgtgaacatgccagtttgttactaaaaaagacctctcatattttaccaacgagccgcagatgttcctagacaaaagagacagggttctgccaccatggtggaacttggcagcggcctctttttttcttactagtcctcttgtcaagataaaaacagaatactaaggcttctgcctgattgggtgatttcttagtattcttcatgaatttcctgcctgtcttctcttgaagatgggtcaactaccacaagagaccactggttccattcacatttgctacttttaaaaactagggggtgggggtggagagtggttaagagcacttgttgctcttgcagaagaccagggtttgatttgcagtacccacatgatggttcacaacaatccctaactccagatctagggaatctgaagccctcttctgacttccttgggcaccaggcatgcatgtggcacatatacatacatttaggaaaaacattcatatacataaaaaattatcaagggactggaagagatagtgcagcagttaagagaattggcagctcctccagaggacccagttgtatttccagcaccttcatggaggctctcagccatttgtaactccaggttcagggggtctggttcccgattctggcctctgtctgcaccgacatacaaggaatacagatatacatgcaggcaaaacacccatacaaataaaagtaaaaaatatatatttttttaatctcaaggctgaagctagagcttagatatagagcatttgccctatatgtcagagtccttgcatatcactccttagctatgtaaaacaacaaaaaatccttacttcaccttctcccttcaaagacaagaagttgggggaaaaatctgtttaggcattttaaatagaagactaaggtacttctagcttgatgccatgttttgttgactgctgtgctctgtgggctgaccttggaccacgtggatgcttttgaaggagtagtcaagaggaggctcctgcaccgaagtgttcatgtagtcccgtttgctcatagttcaggccatcattcatcaggtggaagcatgggccctgggaatctgggttcagcctggaaggatagagaaaaatgagtgttccatacatggagtgtctaccctcagggttccccacagccctccacactgctttctgttctctacagctctaggtctgcctagctcatttccattttagatactggtcctttcatgtgtagtatatttcttacttctcagagcaacttcatgaaacttagaactcatctgatagtgatagcacccattccttatggaggtttttgttttgttttgttgacatagggtctattgtagcccaggctagcctcaaactaatggtccacctgcctcagcctcctgagtgctaggatttggggtatgcagcatcgcatgactacagcacccatttctattttccatatgaagaaactgagacccaaagggtaaaggacttgcccagagtgaagccgagtcagttgtggacagcagtcatagtctccggaatcctactctgagagacctcttactactgcacagtagttaccatagagattgtctttctgcctagtctctgttgacatcagctgcactattctgttacttaacaaacccctgagggcctgcactgaatctggttggtgtctgagtcctttactttataacacagctagagatttgcttcctttcttcgagtctgctcagactgccgattagccctttccatctgagaaccctacttccagtcacatctcggatgtaacaacacatataaacagaaaaccataatctaccctcactcacctgtcactgaagcctgaaactccaccattagggattcattccattgggttcagggattgttccctgttaaaatggaaacacccccagaaagaggtgaacacaaagttatcagtcatttgtaatgagtgacttgtcttaaccaatcctttccaatatgttaggtaaagcaacctgagaacaggttttccctggagactaggaagaactgtggaatactactcacctgggatgaagagagctgaaaaacactttaccaagggctgtttgtttttgttaatgtgtgtgtgagtagtacaaacaaaaagtaaacagacaaaagacaagtctctaaggctatactcctccttttcacttcacccactgttgtcatttcctctgccttatttccttgctttccagaagcatgaggtttatagcaataacatgctcataaagcaggatgcattgtagagcagtgctgttaaacagagaatgcaagtcacaaatgcaagcctaatttttaagataacaatttcaagattttaagagctatgtgggctaatgagaaggctcatcagataaaggcacttgctgcacaagcctggcaacttgaatttgatccctggaacatgtaataggagagaatcaacaccataaaattgtcttctgacttctgtatacttggccacacacataagtaaataaataattttaggagctattatttcagtaaaatgaaatgggtgaagtgaattgtaatatttaactcagcatatccaaaacatttaacgtaatcaatattaggaattactgagctattttagagcccatcccaagatgaactagctacctgttgggtcaggtgcttaattgttacacatgactaatagtcaccaaattggacaatgctgataaagaaaattaaaagtggaaggcaaaagccaggtgtggtggcacacactttagtcacagcacttgtaaggtagaagcaggctgatccctaagttcaaggccagcctggtatacagagcaagttctaggccagccaggagtacacagagaaaccctgtttctgaaaacaaaaacaaaaactaggttaaaagaaatgtatcggacctcacaacttagttattacattcctggcagccaaaggacaaagggaagccttgggatgtatagtactcgtcacaggaatcaaagaagaaattggtctctgtgcagagacaatgaagcattagcaagtactattcaaataaattgtgttagaagccaaatccaggaggcatatctatagtcccagcccttgggaccctaaggcaaaagattgtgagtttgaggccagcttgagcaacactgtctcaaaaacaaatccaaacaaaataacaaggaaaaaaggcacgttgagaatgcaaagacaaagctgggaatgataggtggctggtgaacactggagctgaggcaggaggatcataaacttaaggtctgcctgggttatatataatgaaatcctatctcaacaacaataaaacccacaaaggacctgatttcagtttaggcttaataaatacagtgcaaataaattccatttttggtaatttaatatatgcaagaacagactttatcaggtttgggggaataaaatcttgggtgtacatttgtgaggcagaggcagggggatctacataaattagagtccaacctggtttacaaagagaattccaggacagccagagctatatagagaaaccctgtctggaaaaaccaaaaagaataaaagaaaatgtgtgttagttttgctcttttggcttttgagaggcccaacacccagctcccaaataaatcacacatggaggcttgttcttagttatgaatgcctggccttagcttgggctacaaagtgggatcctgtctcaaaacccaaagttaactgtggtggcttacatttgtaatccaagtaatttcaagatagaagcagaaagatcgggagttctaaagtcactctcagctacagagcaagtttgaagctattactggactacacaaaactgtatctcaaaataaaagcaaaaaagggggagatcaggagttaaaaatgacagagatgaagacccccttgggcagcagcaaagtcaaacttgtaggaacacatggacatgtagaggtccccactgccctgattgtcaggtgtttctcagccatgctagattaatttaggcagtttccttttggcttaggaaaatctataggcatttgagaactcattattcttttcttttttctatggtgttagggatagaatgtatatccactgcacatactgggtaagttctgttagtgagccatgtctgcaaccctcacagttgtcttttgtagaactagaggaacctagcttaggcagaagcccaatgtacttgagtacctacatttattgttgttttttaccacaggcacattttaaattatttaattacaaaatttatgtgaggccagcctgatctacagagctagtttcaggacagctagggctgttacatagagaaaccctgtctcaaaaaacaacaacaaaaattatgtgtatggctgttttgttggcgtgtatgtttgtgctccagttatgtgtgtatggaggccagaggtcaaatcccctgggactggagttatagactcttgtcagccatcatgaaggtgctgggaattgaacctgggtactttggaagagcagccagtacttttgactgctgagacatctttccagtctcctttgttttcctttttgattttcaagacagggtttctctgtgtgtaccccggctgtcctggaactcattctgtagatcaggctagcctctgcctcctgagtgctaggatcaaaagtgtgtaccaccactgcctggcatgaacaggtattttaaaataccaaagaaaaagttttactgttctttggtggctagaactttagagcagaagtgattttgtgaagaagttatgaaagtggagctctatgatgatgatgactctgcttgttggtagctagtactgtgttttattcatcatcatacaaagaacttggcttataagcggcatttgtggaatgagaaactgccaatatgctgatttctgtttgggcagagttgatactgagctattctaacaattggctctcagatccagctgtttcattccatacctcattcccagtaaaatatcaattcagttctgcctgctgccctgtgcctgaccaaaaggaatgaagccaaggaacaaataatagagtcctgtcaggagctcagagagacctgttggatttctattgatgtgtcagagcaatctagccagtcccaagttacagttgcctatttagtgaatactctgtttcaccctcagccctagtgtacctgtaccaccatctccaccacctttaatcccagctctcagaggcagaggcaggcagatctctgtgtgtttgaggccagtctgatctacagagttccaaaacagcccaggactgttacacagagaaatcctgtcttgaaacccccctccacaaaaaccagtagtagctggtacctgtaatctcaacactgggaaatacagacaggaggatcctggggacttactggcaagcacacctagccagtctttaacttgtgttaagcaagaggcaagaactgtctcaaaaagtaaagtggagaatgatagaggacacctgacattgaccatggcttcatgagtatatacaccagtgtgaactcattaaaaagtttatgagctgccagacatggtagtgcacgccagcctggcctactgagcaagttccaggacagccttcaaagctacagagaaaccctgtctcgaaaaacatatatatatatatatatatatatatatatatatatatatatatatatatatgggcagaagcaggtatggatctctaggagtttgccagcctgatcttcaaagcaaattctaggacaccagagctgttacacagagaaaccctgtcttgaaaaaatatatatgtatatttaatatatatttaaaattatacacaaacatatgtatataattatgtatgtatgtatgtatgtatgtatgtatgtatgtacacacacacatacacgaggtttagcccaggctgggctagaacctgtagttaaggatgacttgaattcctggtccctctacctctacatctcaagtgctaagattacaggcatgtgtcacatacctggctttgtaaaaatctttccagagaaaacatcttttaaatttatttttatcaatttaggtattaaagctggcaagaatcaatgattcctattcattgtcctatatctatcccctttgcactataattttatagttctactctactctgatgctgagctcagcttttgaaccagccagtgagatgctgataaaatgaagaagatttaaggttttgttttgggcactggacatgaactcaggagtcttttatatgctagggaagtgctctagcactgagctacatttccagcctggcaaatagaaactttataggaagacttgctctcctgtgctctgccaatgccacaagtactggctggagtgcttgaaggatttgagacacaggcaggtgctagaggtgaaaatgactcaatgccctcagcagaggccagtttagacttgtctacagtcagattgggagggtcacctaaccttcccatgacttcaggcagatgtatgaactcactcaggtaactcagagtcatcaaagtaagaatgattgttgctttaagcctctgtggttttggatgatttgatacacagcaatagctaaatgatccattccccagatgctctttggacaaaaggttatcatcatctgttttcttacttgtgaaattaagacaatctgacctgaagagctattgtatggcctccagcagatgctcagtaaaaggaagtagcattactctgtgtgtgttactggggccttgtgcatgcatgccagggtaaatactctatgaactgagttacaccttcagccctctatactaagttctttattgtttgtttagtttctgttttctccctgtaagcttgaggacagggacaagaagttagacttctgtttcaataaatacactaaacttgacaaagactgggtattggtttgttgaataaatggagtaattaaagaaggagtacatgatgacttaaatgtgtcacaaagagtcctgccttccagcccagatgctgccttccttactcctgctgctctctggagtcaggtgctttccaggccactctttggagagaagatactctacatggcattcatgtcaccaagctgactcactgacctgaccaatgagagggttaagggaatacttattttgaatttgagttttcttttcaaaacttaaattaaaaaaaaaaaaaaaaacaacaaagctgtagatgttgccaggcagtggtggcacgtgcttttaatcccagcacttgggaggcagaggcagacagatacatgtgagtttgagaccagcatggtctacaaagcaagttccaggacagccagggctatacacagagaaaccctgtctccaaaaacaaaagcaaacaaacaaaacaaatagacaaaaagaaaaaaacaaaaaaggtcaaacaatatagagacgcatgagcagactcaggaacttaagttacatgaagagtttgggacctctggtaatacacgtaaaaggcactagatgtttataaataaaccccatgtatttctttgtaagtcaatatttttttcttttttttcacattcctgtatattcttttacctaccacccccatttttcttttgggtttttgagacagggtttttctatgtagtcctggctgtcctggaacttgctttgtagaccaggctggcctggaactcagagatctcctttgcctctgcctcttgagtactgggactaaagctgtgcaccaccactgccttgctctctctctctctctctctctctctctgccccccctctctctacacacacacacacacacacacacacacacacacacacacttacttcaagatagggtttctctgtgtagccctggctgccctggaacttgctctatagaccaggctggcctccaactaatagatctgcctgcctctgcttcccaagtgctaggattaaaggcatgcactaccacctgcccggctatatatgttatttttaattttatttaacctattccaggttgacagaaatttccagtttggagaataactaagattgttgtaggaggcttgaagcgaaaatcagttaggaaagctgatgggagatcgacagcctagtttatagaggatttctgttttggggctgcaggtggagggaaaaagaaatcaaaggatgctataaaaaattggctacacagccaatatgttctggaagattacatttccaggtgctaaaggaaagcccaaggatgacttgattcctgcctgccaactcccatcttatcttcaccacattctgcagtatggccaaatccaacaactccaactcacagtagggtccctgcactcccatgggactctcagattgaaagtttccctttccagagtcatctgcttggaatgtagttttttcatgtcctccttgttattcttgcttcaggcaccaactccagtatgaacttttctgagaaaattttccttatcctcaagctggatgtggaatctccctacttggctctcaccataccctatacttactgccatggtagtactcataacactaattatctgctcactgtctatctgacgagaaactccagcagggcaggaaacatgtttttctcatagatgtcatcgtatactcactccctgactgatacaactaaataaatgacagagaaggacaggaagcactataattgagggatctgatctggtcatttctgaaggatgagtacaggcaaaagtacagaatcacaggaggaaaagaccattccacaggtttgggatatagctgagagaaagtgcttagcatgtatgagtctctgggttcactttcaccatctacttccctccccaacacaaaaacaacaacaaacaaacaaacaaacaaacaaaaaagacaagcattatagttgtgagcaaaggccaagtctccatggtggcatgttctagtgtgtgctcagcaatttggaagacattaaagtgatacaaaccagaatggagaaaaggagtatatatggttaaagtacaggctggagaggtgggcagagccaccctgagaggctcctttattctaaaaacagcaggaagccatggatgtatattgaattggggtaaggagagtgaataatatcatattttcatttaaaaaatatttttgttgagctgggcattggtggcgcactcgggaggcagaggcaggcagatctctgtgagttcgaggccagcctgatctccagagcgagtgccaggataggctccaaagatacacagagaaaccttgtctcgaaaaaaaccaaaaaaaaaaaagttatttttgttgaagtatgcatactatctagaagggaatgcaggaaggatagggtggcagcaaggactgaataaaaattatttacatataggaggcagaggcagtaagatcacaaatttgaggacagcctgggcgaccaaggaagaccaagtctttaaaagaaaaaacaacagcagcaaacaaacaaacaagcaaaaatcaaagactacttgctgctcttggagagggcctgagtttagttcttaggacccacactggtagctcacaaccacctgtagctccagatccaggggaccagatgcaattttctggcttctgagggctcttgcacacatgtgacatacattttattaaatattttagctgggtggttgggtgctttccttagcactcgagaagcagaggcaggcattatctctgtgagtttgagaccaacttggtctacaaagtaagttccaggctatgcagagaaacccttccttgaaaaacaatacaaaacccaccccctccatataaaaagatatttagctagattaggtgtagtggtgtacacttttaatcccagcttttagggagggagaggaaggtggagctcggactttgtctcagaaaaaaaaaaaaaaagacatttaggggtttaagaaaggatttagaggtgagggaatgagggaaagtagatttgatcaaaacacattatatgcacgtataaaattctcaataagagaattctcgccaggcattggtggcgcacgcctttaatcccagaatttgggattaaactgtcttgaaaaacaaaacaaaacaaaacaaaaaaagtcaacaagaaaaaagatatttaggtattaagtgaactgtattagaaatgcagccgggcgtgggtggcgcacgccgttaatcccagcactccggaggcagaggcaggcggatctctgttagtttgaggccagcctggtctccagagcgagtgccaggataggctccaaagctacacagagaaacactgtctcgaaaaaaccaaaaagaaaaaaaaatggcaaaaaaatggtagaaatggaaattattaaggataacacttgggggcttgtcttgcatatattgtgcattgtgggattactgggtgaatcccagatttggaaaagtggcggagagtgcatagagaaacaatgaatttgacatgcttcaaatatatatcctgaaagagatattagggaaacaattggttatacccatctggaactaaaaagatgatggcttggctggagacatgcaggtggcaaataaaggagtgggtgctgatgagcactaagaagagggtatagtgaagtggggaacacaagacgaagcccagagaaactttaaaatagtaagggaccaatcagggccagcaaatcatggaagctcagacttcaggtatcctgtcagctgttcttgcttaatttaaactcatttgattcccattgccttcagtctctagtttcctttcttcattaataatttcaaagatggatctgaaactcattcatgttgaagtgtaaataactcaagacggtcatacaggtcgtccccccccccccccgggcagtttaaagtaatccttgggataagtacaagttgctatagatgcagccaggtcaagctaaagagagatagtttgatcttaaagaactggaatctaaccgggcggtggtggcgcaagcctttaatcccaggactcgggaggaagaggcaagcggatttctacgccagcttggtctccagagcgagtgccaggataggctccaaagctacacagagaaaccctgactcgaaaaaccaaaaaaaccaaacaaaacaaaacacaaaaacaaaaacaaaacccctggaatctacttctagctttgtcattggtgtggtgtgtggccttgggcaagtcccttatctctgggtttcagtttttcaatctgtggaacagggataaatatcctcgactcatagagctgttttaatagaaaaagagtctgtaaatgaacatgagaagttactaaatgtactaagtctgttaatgaggaatgtagaagaaatgcagatctaaactgtagcttccagaagcccaccaggcagggagataggaggaaaaggctaatttacatacaacactcataagctcgtggatgggaggaacctatccctgaaaatggtcttgattggaagagtcagggaaagggggcttttaagccccgtgacactcttatgtgtcatattaagcaagtcctggttccctagaggaaaaccaacatcatgcccgagggcgtttccaatttccttgtgtctgggacttgaggcacctgtactggggcgccatgcttgccctgaggtgccaaagtatgtatgggtatgatacccatagtcccccagtttatctcgagtgctgtattcaccgtgaatagtgtttgggaagaatctcaggtccccgattgggaaacttattctttttgtggagttcttccccttttagagagctctaatgtcctagaaagtttttcctgttttcccgcccaactcacccgctgtttcttaccctccggcctcagcgtcccactaccagagggttacttagcgcaactccatggcaactactttcgtcaccacgccccagagagtgcgggtgaacgtgctcgtggtgcctttcggaacttgtagttcatcgggtcaggacgctgaagccgcggggtttgctgggacttgtagttcttgttaccatcaaggaaaggccggaatcaggaagtagtattaacccgtcttcttttaccgacgcccttgcacttccttttcccgggttctccagggtgcccggctaactacagccgacccggtccaatgagagggcggcgagagggggcgggaccatagtttaaagtaattgtatcttcaccgagcgggatatacctcgaggcgaagtgctgtccgaggagcgcgtgggcgcgcgtccaggtaaccggcgcgggtccttggttggcgtgcggcctgggtgcgctcaggggatggccaggcttagacggggtgctgttcactccggtgcgagaggagggcctcctttgtaaccgatggtgaaaggagaccctacaggggcaaggtttgtgggtaccggtaatgatttttgggggtggcggtgggtctgtttgggtccttgccagtgggattatggttgaggaccgcggtaatgggggctgtgcaatactcttgaatgttcatgagggtcctgtgacgcttgttattaatggtagcagccgtagca

SEQ ID NO: 28 - DNA, 78849 bp, Cricetulus griseus
  >scaffold_202 dna:scaffold scaffold:CHOK1GS_HDv1:scaffold_202:25:78873:1
ttgcaggagacactcaacatggacctgtaacctccacatgcaaatgggtgcccaggtatgtgtgtctgttctacacacacacacacacacacacacacacacacacactcacacacacacactcacaagctatgtctaaaaggatcaacagtcgctgaccctgaataagcactcagggaataagagttccagttatatagctggagggaaaattcgtgtcccacggcagaaagctgttccaggaacacagccatcagagaggtgggctgggctaaggctagagcgagtacagtgtctttggccagtgactaaggcggccactgcatccaacccgggcagggctggcttgggtgggtgccttggctggccctcactcggggtgatgcattttcctgtaagctctgtgtaagtccagggctagcgctgtcctcccttccccggagtctagcactggtcagtgatgagagatgcttctgaaaggaggcagagagtgccagggccctgggaacttcatatggaaagagagattagacagctctggggaggaaaggacagattcataggggacaagtcatttcccaaaagccacctctgttgattcagccatgtgaggtgtgaggattacaaggcaggtctgcaggccaggctgagttctgggatgaaagccagtgtcaacgaagatgaggtctgaggagagagaacctgatggagcagtaccaggagggctagcgcgggtgtgtgctcacacacacagcttctaatggccaccacacaccacacagaacagacaagatcttgtctctgagaatctgccttcaatgtctgtcctggagtctaggtactggggaagctaacagagatcagggctcgggtataggggctccaaggaccaacataacagtcccaaggctaatgaatctctcactcatctgtaaggagaatgcaggcatcccctcccaaaaaagcccaaccaaagatgtcctgtgttcagcttcaaaataggctccagacagggcctggcctgtggtaaggccctaaccagttactgtgagctcttcttgccagctctagatcccacagcctgaggtgaatggaccaaggccactttttcacagctgagactaagaagacggctctcaaggcaaaatgactcactcacgctcatggtatttgtctcataggacagcagcaaaaaattatcacaggccaggtggtttaaacgacagatagtcatttcctcatagttctcaagttacaaaccactgacacaagagcaggcgtcagccaggtccatttcccctgagacccctttccttgccttacatggggccatctccaccaagttcctcagctatcttcttttggtagcatctaggtcccaatatcctcttctcacaccagtcacacaggctgagggcccatacttgatgcctcgatgaacaaaataacctcttcaaagacgctctttggggacaaggtcacattctgagatagaaggctaggacttcaacatacactttaggggtcatgatcagaccatggcagtcatcaccttttcctgaagccttccaagcctgacagatacaccagtgtctcaaaagaaaaccttgacttccatccacccagaatcatattacaaatgggagacaagtctatgtgtatggctcagttggtagagcatgggacttaatctcagggtcgtgggttcatgccccatgttgtgagccacttgtaacacgacaaataaaagacccagcgacttatatatgccacgtgtagatggaagttttggtcttgcccgctcctgcagccatttagtcccaaataaacacacagcggcttacattaattataaactgttccccatggctcaggcttctaatagctagcttttactctcttaatcattaactaattcctgttaaactatgtattgctgtggcttacccataatgctccagcatgatactatttcggcagttacatggcatctctctggtgactctgtgttcctcttcccagcctggtagcgccgcctatacttcctgcctggttacatcctgcctgtccattggctgaaatagctttattcatgaaccagtaagagaaacatatgctcacagcatacagaaggacatcccctatcatatgtgtctcctcagagaaatcagcagcgtcacgtgaccaagagtgagtctccctcaacttgaaacactccacctcgcctgagccgtttacaagctacaggtcattcctccacctcagactgactgcttgtcatgggaatgaaaatgccaccaccaatgtccatggtgacggaactcggctctctatataagggatgagtaaacgtggagaatgccaataaccacgccagctccgtttcttcagtattccacagcctttgtgctggtggaggtaagatgatataccaccacgtggtgttcacacagggccaggaacctgctgctccattgaaagcttctcaagggaacaggggtgcagttctgcctagctcttccatccagaaattgaacacctgacatagtgaccactgaagaatcaaggggtcggagtcctgccgtgtgagcacctgaaggccactgtgggctggccctaggctgagctcctcccaggaggtggagcacacagttagtgtttaccccacaagggctcctctcttcccttgcctagttctttactctcctctccttgggaaacagcactttctcttggagagacggggagcaaagcaagaaagacgaccatggtttgctctctatcctgagtgacagtgctacttaaaaacacccaggagaatggaagatgttttctaggcattggcttttttccttttacaaacacctaatacctttcccctttgaccctatacccctcagggcagagccatgttcggaagccgctctctatatcaggtacccaacataatcagtgggttaagtggtacatcgtcattgcttggcaaattcagtgaacagtcatgggtaggttgacaagctgcttctgagttccttccttgcacaaagtgaggtcccacagacagaacaccgagccactggcaataagaaaaccagccagatgtgcatctgatccatcaaactggcaagatggtggcccaacagagggtgtgaccatgtggggaatgagcccagtgagaaggggtgcaaactgggatgactgttccggaaagggcttgcttgacggtgtcctgtggatgatgcagaatgagcatcagactcagaggcagcagtgctgctggcctccctgtgtgaacccccaagaagctcagtaaacacttgcctcccatagggaacgccaggaagttggtgccggcaacactggctggtatagaaacagaagaaataaaaaagaagcaagtgtcatcaagcacaatgtctcgggaccgataggccagccttgggaaatgcttagcactggccactggccattccctttgggaatgccatacccagcccctcacccacccacccacccacccaaccatgcggtccagctctttgtctggtgttatcagcctcgccccacggagggaggggagcagaattcacatatgaaaaacagtagcaggctccaggaaaccttttcacttgtctctttgcccaggagattttccctgacaaagagcctggcccttagccaccagccctggggaggaaggaaccgcgttcattccatttaaaccaatttgccaacccagacagcagctaatgggcagcccgcaccctcacagtcatcaataccactttccaaatcaagttaccaaattggtcttaaaaccacttcaaagggacccggctgaccgttaccaatgaggcatccagctgtccatgtgactgccactcctactgccagtatcgttttccatagttaactatgtttcccctaaatgcctgagcctccagaatggaactggagtcctttgaaaatgaactagctatggccaggagaattaaagaggaccaacggacaagccccagagagaccaatggctcactctgaatccttaacacacagcaactgtgtgatgttagtatgtgtataacccccatattatagctgaacagactgaggttgtgaaagccaggaaggtctcaacctagctaacaagtggtaaatgtagaaaccaccgtctgcactcaagctctgaaccaagctggttttatactaggtgcagatctccaggcctgaatctctttacaggaaatgtcaaccgaacctcacacaagagccaaaagtcgtttccctaggatgctcgtgttcctcgtgaacagagtatttcctggagcgctagtggaagacatttatttaacctctttgctttttgtcacatgtaggcctgagatctgagaacaggggatggctttccatctgggatgctgagtaaatgttcaaggtcacagagacaggacaagagaagaaggtccatcttagacattaggcatgaacttcactcccagccctgaagatgtctcctgaccaagtgtgagggttaatcttcattgttaacctgactggattttgagtcaccatcctaggtgacttctaggtgctctgtgaggatgtttgcagagagaaccacccaaggcatgaaaccccatccctgcaaacatgagtagtggcatccatggactggggcctagtactgaatttaaaaaaaaaaaaaaatgaggactccagttgagaactagcattcaccttcttgactacaggtgccaggcaaacagccacctgaagctcctgactccagagccgttctcacagccatgataaattgtaccatcaaacacttagccacaataaaagtttccaagtcacaacaaaggtgctccaagtagcacaccaagtaacgtgtcaatttgtctttggacacaaagctctctagatgggtccatgtcaactctactgggttgaaagagacaagatctgcaaacccactgtgtccaacaaataagactttgcactctccactcccaactagggaacatttgatggtgtctagaatcattttgagttgttgtaaccagagttggggtttgtggaactgctggtattaagtgggaaaaaggcaaaggagactattaaaatgcacagaacagccaactgctgaactgtcagaacccaaaatgtcaacagttggtgactgagacacgctagtttagatcccacacatgtctatgtaacttggtcttcctaacttaggccatacaatgaaaacctctaccactcattaaaatactacttagtgctttgcgttagactcgtagataccacccagttttatagccagcacagtcagtctcacaaaaactcaaccacggagaagagctgggttgaaattcatcccacgaaaagattcaggatgcttgagaaacctgccctttcatgtgatattcctgaaggcctactatgagtcagaccccatgcacgggggaagactgataccaacatcaagcactactttctgagatgcagggatggagtgaccatgccccaggtggcccacgggtcacgcccaagcctcagtcccaaaaccccacatagcacattttgttctttcttagaagaaaggcccaagatacaataataatccaggttaaaatgacatcttctgaaatctcacagacagacttgacagttttagaacagccactatttcaacaggtaagagctgataccccagcttcagggaaggattgattcagaactacgaatgttgttttccactaaaggatgctgaagctggagattcgggtacctgaaattgtactggagacttagtagtcactcactcgcaggaaagccctgtgctctcactgggtccagttcaacagctgccctctccctgcctcaggggaccattataggtcaaaggggagaagtagtagtagtagcatcagtttcaaggtacaaacatgtaaatgagggatgatatgttaatgagaacagctgtgagctcacaggaaccaaactatactgatttctttcctttgtcccaggcaaacggacctgggttaaaacgtttagatgagccatgcagtttgaaagagtcccttccaaactccgagaacaatacctcacaactggttagcggggtgaccggtacaaggcacacagggatgtcaggaaaagaactgggaatgtggggctatactccaaaagtcaactgaaagtctagtgacctggcaggagactgaggtttgaggtgaccgtgggaagagtcatgactctgactccaattatgggcacacagacaaaatgccccatggaagaccacagagtgggatgatccttgggaaaagaggattgcctgcttccccaagggggaaagttccatgttcagcgtcaggctgggagtttgcaatgcttgatggatactgatggtcaacttgacaggatgtagaacccctgaaaagataagcctcctggatcgtccaggaggggattatctatactagcttaagtgaggcaagaagacctgccctaaatagtggccacactattccacagactgggtcctagacgtcacaaaacaggagaaagaacagtgaacatcagcatccggtttctgacccaggatgaaatgtgagcagccgtcacacgtcacattgccagcacatttccctattaggagggactgcactcttgaactgtgagccaaagtaagtccttttccacggttaggtttgcttcttggtgagtgttttagaacagcaagacagggaacttcacaaggcttgaccatgaaacagtgagtccacagactgagggaagatgcggattctcccatgtcaggaaaccacacttagaggcatggcggccatggtcaatggcggccatggccagaatgttcaaacaaacacttccaggacactggagttacggaggtgcattctctagcaggaagttggatcctagcatgccagatgaataaggggcgtatccaccatgaggacaaggacagcagagtccccctgaggattttactactgaccagaagcagtgaggatgctcaggagttgagtgctggccataccacgggatctaacctactattcggaatattctccatgtatcaaattttacagcaacttttacaatgcatggtggcagactaaagcctacctctcactcagagagcaaactgctctgagctggtgattgtctatataactactattttaaatatttaaagtagttaacatggtcaataatagtccatcacatgactatgaagaaagagcagagctcagcgggaagggagtttttttttttctttttttttttttagtttatatatttgagttataaacaagattgaattacatgacaatcccagttccctctccctcccttcctcctctcccacccccccaactaaaaccctacctatcccatatcctttcttctaatctatacctgactcaacctttctgctccctcatgacctctgcatccttcctcttcttcccttctcattctcgtagctccctcccccctcttcccatgctctcaatttgctcaggggatggtgaccctttcccattctccaggggacaaagtttgtctctttagaatgggaagggagatttatatagacggggagctcttccccccagactctatggaccaggaaggcacacaggaatgcacaacccctccgatgctgcctcaagtttgtttctggcatctcttattcccaagaggcctttgagtgggactttccttcaactctcaggcccaccgaactcacaagcaccatcacaatgacggtgtatatgacaacccacggcaggaagtgtctcttggaagtacagttggccagaagagtaaaggccatgtaggaccttgagaacaaaatgcaggttctgtggacaacaatgcccaaggacttgaagagtcagagtatcctgcacctgtctcagatgacttttaaggtatcttttgcccagtcacctccggctgtatcctatctacccctgttcccagctcctcccactccacaaagctctgtgctccagtcataccacaacagggtgcagagccccaacttagtctgtgaggacctgtcactgatgactgtgaaggagaaggaagacagggttgggtgagcaccactgaacaggtgctctttcctcctcagtaaccataaggcgctggcctccagctccttatcaaatatcgaaggctgagaaagaagtagcatttctacatctcacacacccatggctccatccttgacacccacccctaatggaacggcctacctgtcacaggaagaccctaggccaaaacactaaaaatgcagttggaattcagttcacgtccagcaatgcgtacatctctccatcctgtgcatcacggctttgcggctttcagaacaaacggcatcactatttaaaagtgccatttccctctaaacactcgaagaaaacaaatgtcagaaccccaacgggatcttcaattgcagttcatgccatcggtcttgctaggagctttcaaatatatacatttgtgaaaccacaggatataaaatgctttcccttcacacccccaacctgtccgtactcaggagcaggttgtcaactcaaacggcagtgttcacggcatatcagatacggcctttggaaaccatggaccttcatccatagtccggaagaaatacagcacaatttagccttctccatcccagggatggaacatcctcagggatatgtagcctactggtaacagcaactattatctgattctggaatgatgtgaggggcccagacggattccccccacgcctataaaatgacatgcttactcgccacatggcttcagtcctcaagcagcaaatcagagaggccactcgcagaggacacaaaaccagtgatgtccaactggcttccgtgttgagggggatggggctgctttggaagagccaaagcaagagcagggtgagaagaaactctgagctcgaggtacagatgtccacacagctgtaagccagacacagccatgcaaaggtcacgactgggggcaatgaagaatctgggattcgcatcctaccgcagtcacttactgaggatcaaaagtatctctgcttgctgagcttgagtttgacctctgtataactataaatgagaatgaccttatgtatgtcttgcatacataaagattaattagaggaggtggccggtggtctcacgaatggcaggcgagactgctattggtgggtaagcagctgctatgtactggtagaggcaagatggcctctgaagaaaaagaaattgattcaataatgcaagattatcacatgaggatgcaggaggcaaaaccgactaggggtggtgattgggtctgaagtgacgatgggagctgtacctgcacttttttttttctctatctgaaagctactttgtgtgtcagactctccagaggccggagtcagagtgtatgtacacagaagcaccttttttttcttttttctggggctctgtcattaagagaatccatggccagcaaggtgcctgagaagaggttactggatgggacagctggctccacagaggtggaaccaagccgggtgacactgggtgacactgcggggcaccatcctgtgcaagaatctgaagcgaaggctcccactccgtgtaacgttctctttccagtgtgacctgtctcttggacactggatgcatgacagaacacaagtgaccctagaggatacaacagcacagtctgcccactgcccctgctggtctttaaggacagactctctggggaaggagcactgtccccaaagccagcccatgggatgaaagaagcattaatacaagaatattctagattcaggtggcaagcagccagcatcagggcagtctcagaagccagggccagcgtcccttcatcttctataagcaaagcaagggcattgcctgggtatgtgcaactagtcagagagtcctagcctgaagcacatttgcctggagaaagcaggctgccctgcttttgtctcgggccactccccactcagcccccaccaccctgaaagagccaatcacccacacctcacagcacacccttccttgagtccacagtccccgccactgacacctttcaggctgtgcaaactcttggtcaagtctatccaaactagggacagcccaagcacacatgatggccacctcttagcccatacgaaggacctggctttgccatatattctcagcaacgccgaggagcaagtactgtgatcatgacactttccaggtgagaaactgaagctcggcaagattcagaacgtcccctagacacacagtcagaggtcctgctcagggtcactgggccacctttgtttcaccttccttgggctataggccagacagtggacttgggtgtgattctgatacataccagctgtatgactaaagagagacaaggcattctgtctctttgaaacttcatttatccctttacaataagaagtaaatgatctgccagatgcaggctgacttcgtgttgagaacggaatgaaaacgccttctctgaggtctaacaaacaacagattccgtcttgtgagtgggtctctctgattactgcatagagaagacagacatttgcatgcatacacagccagacagacaaagacagaaacagatatatacctacccggcctccacgaataggcatccaattaacctctaggacagtgttacgacctgtttggcaatcctctatctccaaaaaatatttacattatgattcataacagtagaaaaattaccattatgaagcagcaacaaaaataatttttcagctgggcggtagtggtacactcctttatcccagcactcgggaggcagaggcaggtggatctcagtgagttcgaggccagcctggttgacagaaggagttccaggacagccaggactgttgcacagagaaaccctgtcttgaaaaaccataataataataataataataataataataataataacaacaacaacaacaataattctatggttgggggtcatcacaacaggggagctgttcattaggaatattgacagcccctggtctagaagaaagacagtaatgaaaggtatgctcatggaaacagccagcaggcaggtaggcaatactgctttcttccttctcagtgaagaaagtcttaagtgaaggaaagagaatttgaatggggcctggttggatggcagcatattcagacacagcagctcaaacagaacaaaaacaatcctccaatgctgctttaatcccagcccctcctgcctctgaagtgactatcgaccccaccccagcactgtttctcagagaaacagtaaccaccatgaatgtagcagtctgtaccgtgcctgcctgcaaatcccagctctcaggctgtgaaggagggaggaggattgggagttcgaggctatcctgagctacacactgaatttgcagccagcctcggtgacatgagatcgcgtctcaaatatataaaagtgagttgtggagctctttaacccccccacaccccttgtgatagggtctctctcccaagaacggggtctccaccattctagaaagcatttaaagacttctaaatgtcacagacgtagcaaagataacagtgcagaattcccagctcaaaggatggaagaaatgggagaagtgtaagcgtctatctctgagccacggctggccatctctctgtatctctagcaggcccatttcaaggatccagtggcataacctccttgtcactcaggtctgggacctccagagaagaagcccagggaggtggtattcccaggaatctgtgtgacagaagcaggaaacagggcaaagtggccctgccaagttttccaaaggaaatgagtcaagcggtgttatgcagtcacacatggccaggcgaggaaatggcattgtctggggaccagcacatagggccttacataagaggcaccctctcactttctggccatggccgtatttggggattggcaataacacgagaaggagcacggggactgtgtaaacacaagctgcgttagagcgttagagcagtaggcagaggtctgggtggggattctccttggctcaatactgggagggaaattgactcacatgtcctcgtgccctggtacacactggttaggccgccactctggggacagagtaccagtctccaactccacaaaatacgccttcaatacatgccaatctgggccctaatgagaaacatggtaccacccatccaagacaggtaataagcatgaaaaaggcatgcggttcggagcctgcagtgagggctccctggccgtgcagaggggaaacaagcaagagctcagatctgccaggaactctggaaactagcacggatggggatgccccatgagcagcaagcaaacgacagagacactcagaaacaccaccaccctgctgcgcacaccagaagactctagtcaggttgaagaaattctaaaaattcagccgcatcaattcacatggttgcagcccatgatgtatacagaaggaaagagtattagctgcaaggggattctctgtggggtctgcacgtgcagccagctctgcaacaccagtgcgcacacacacacagacacacacacatacatacaaacacacatatacttacacacatgcatatatacaaacacacacatacacaaacatatacacacgaaaacacatacacacacatacatacacacatacacacacatatacacaaacacacacacatacaaacacacacatacttacacacacgcatatacacaaacacacacatacacaaacatatacacacataaacacatacacacacatccatacacatattcacactgacacatacacaaacacacgcacatacatacaaacatacacagacacacacatacatacacacatacacacactcatatacacatacacacagagacacaaacatatacaaacatacacatgcatacacaaacacacagagacacagacaaacacacatacacaaacatataaacaaatgcaaacacacaccaaacacatacacaccttctcttccaaaacggaggtacacctaggccctaccccaaaggatacgacagactccgaagacccccggtggaaggcctcaccctccctggggagcagaaagggtatgggataggtagggtgttagttgaggggagacaggggaggaggggagggagagggaactgggattgacatgtaaaacaatcttgtttctaattcaaataaaaaaaagaaaacaaaacaaaagaaaaactaaggcacagagagcttaaggtctctggataaatccaaccctccatgaagtttaaagaatcagaataaaaagccaggtttgtttgagggtccacaagagggaattttcttctcttccaattgattggttttattttatttattaagctatagaacaaagttagaaagttttagaaattccaggggtgtgggacaaatcactttttccccatgccacgtcagcagagaacctgacctgatgctacccgagtgtgccaagtgtagatttccacctcgaggaccctgggagtgtacttcgaggtaaaacctaaccctaaccctactgtgtgactgacatctgtcaatcaccactcaagctttcctaactgtccagattccgtcacctctggtccccacactctccagactccttctttctggtcctgttccagcacccttcatgagctctgtgacctcgcttcgtctagatttatcaggcctttccatcgcagcctatctccctcatgtgagctgtcaggtatttcctcgtgacaaaccctcgcggtctaccttcattcgtctttttccctctgcacggttacacagtgagagatgtgacggggaaagtttcctggaagaaagtcagccatctaagtcaaaggtgacgtgacagcagcctcagcttcaccgttctttaatggcacggaggcaagatggtggagcgtggtttacggcttagggagggatggagcagcctgcctgtctccggagcctctcgtttcaacccagccaagtcgatcccagcatcttctcatgccagctctgcttacaaataaaaaggaggagggaaaagcctcagagttcggcttaaaaggacctttcatgccttgccaggcctctgtcttctcctcaccacgcctctgtcacagactacaatacatatgtttatcttgcttcaggcaggggtaaattaaaatgcttgaggattttcccctcctaacgttggcatgttggctcccagcggccgcatggccgcagatcatgaattgcaaaaagcagccgtaaattacggcctttgcaaacacacagacctttcctgaggttgcaaggcgcatcactttaaaggccgactttcttcaaacttccaggaactgagtggctcggagcccatctatttaaaggtcaggctagccttgctggatttggagggctgcctcggacacaggcttactctcagccccgctgcacagtcaccatagccagggcagctatgagcagccgcgtgtcccttcaaggatgcagaaggcattgccagacgcagtggcagggccaggaaggacaggaggggcaggggtaaccaaaggtgatggtaactacagattcatccctctgctggggatgaatctcaaaactgagccgaggtccccgtgttccgggtcgtgataatctttgttcttgttttagttcagccctctgtaaaacagtacctggaacaactttaggggtaaagtgttatttgggcttatggtccatcatggcaagagcacgagggagcccagctcacacggtagcagtcaggaggcagatggaaagagagacagagactaagctagctgcctcgtacccttcccgttctattgagtctaggcccaaagcctagaggatggcactgcctacattcagtgtgggttctagcctctgaaaaccccctcacagactctaacaaacctgtgttttactaacgctacagtgcttttctgtccagttaagttgacagtgaggatgaatggtctcaagtcagaatatagcacccacgaggatccctgacaggctggggttaggggacactctagggccaagaggcaggctgagatcaaggagcaggctggggcaggatgttgacattcctggggaggaatatcagcagcaaatggtattattccaggctcggtgatcaaatgagattcctcttgaagacgggtttaggggagcaggcatcaaatcggtgtggagggaggtcacctaggggcagggaggggaccctcactaaactgaccgacccaacagagtgtacgaaacagcagaggtgcctcacctaccagctgacgcccacctctctgtttaattaagctcctctggcagtgccatgcagtgagaaactgctaccggatgaactcatacaacggccctggcatgcatggaggtggccccatggcttactcacgacatctaagaaagttgttgcttggtagaagtcacccagcaagtaagtggaggtgactgactgcagagtccctgcctgaccctagaacacgctcaaccgctgccctgtgtctccatgcatgcccagtagcatagtaaggacaacccacagctcctccacagcagggcttggccgccaagtctcgttgtcaccctcgggcactcgggagggcttcaaagaggaggtggcattttaacattcccttccagaaggctttccacgggtcagagggaaaaggaagaatgagccaggaagaaaggacacagtaaacaggagtagcgaagccacaaaagggtggcaactacccgctgagaaagctcacagaggtcgtgaaggagtccaggggtcctttgggacatctttcccagtctctgtgcacggtgtcactcactgtgtcactctggcttttcccatcaatgctgaggaggaggcctcctcgggccagtctatgggaaatctaaggcagaagttagcagttcctggctcctgaagggcaggacggtgtttgtacccacagctgggctgcctgcggctgagatcattgctggcccaggaagagatgctcagtgagaggaagccggggagcaaccacgactgtgattcagtacagacctttcctggtgtctgattagcctgaaaagacggaaatcagaactaacaaaatgaaacactcaccagggcaacccaggaagctctctggcctaggagtgagaagggcaggaggtcagagatctccagacacagtcatccgatgggaccgagaagggggactctgtctgcaggagtgctggaagctgaggagcagggaggcccgctctgggatgggatggagtgggtgggtaggaaggcacagccttcttggtcctgagtcagctctgatatgcaatttcccaaacaaaacttatctctccagaggacggatgccgggaattttggcatctgggcgtagtgtgctgcccagcacgggcatctggtgcaggccttcacagcaccttgctctgaagcaccttggtgaagctaagtgactgaggtgatagggaggcactagggtcaactcttgagcttccctatagattcggcctgtctctctgtgggtgccaaggaaccagtgcccagggggtcaccagcacacaggcaagaagagaactaggccatgcagtggcctgcgggcggtgaggaggacaagaagccacacctcctcatgcttctctcctaaacaaaattcatcagccaaggaccctgacatctcctagtctcccatccaaacaagtctaaaacagagcagcctctgggaggccatccttcagcgggattatataacactgcagatgaacccggccttgctcggcacacagttagcactaagtaaagctcacggtttatccactgaagagaacttacatccaccacatgcctaagtatgaccttctagatctttccggcgtggcagagggtcttccttgtgaagtcagctttgccttcatcacacaagactaggtcagccatgtcttcatctttcaactagagtgttactgtccccaaaggtcatactattgtatggaaggattgggcagtgtgtgacttatatctcaataaaactgccatattttaaaatgaaggggccggggatctacaatagagtggttgtcttgcttttccaggccttaggttcaatcctccatggttggaggaggctggggtggggagggaagaaagagagaagggtaaaaggaagcgagaataaagacagctgtcactggactatagcaataacaccagaaaatgcaggtcccagctggatgggatgctgactctagaatagatttaaacagtttgatgagtgcaaacacacacgtccccgggcacacacccccaaacacgggaagctgtaccgctgcctctgagctatccgcccccagctctgacccccactgtccaacaccacgacagagagtcatgcggtcggtagacagtcaggaactcttattttgtctcctgccccaagcaattcctaaacagtgggagttaaatatttataaagcagtcactgtttgtttaatgttcaatctggtattgggaagcctgatgttgagaatcgctgaggtgacagtcgattatacaacagggggagtccggtgcaccagggtgcctgacagtaaccaggaaggcatgtctcctctccggggctctgcagaagttgcttcctgccttgtgctgtgccccagggctctgaagattccttgacttactccccagcgtccgtggacaaaaaagaagacagcctttgtcaccaaaagctaatgcatctgcacgtgttaggaacagtttcagggacgacatggggtggagcaccagaggggacactcaccacggattccctcacgtgtctgtggcaacagttagtccacacaagctatgtgtatgagcgtagtcaagacggtgagtgatccagagttgggcacacacgccatgcccaccttcaaaagctgctctccacatacttagctgagtataacaggctccagggctcagggagggcactgaactgctaggaacaactcttcagtcagatgacacagcattttgaaaatttattttaggctgggcggtggtggcacatgcctttctttgatcccagcactcgagaggcagaagcaggcagatctctgttaactcagggccagcctggtctacagagtgagttccaggacagctagggatacacagagaaaccctgtctcgaaaaacaaagcaacttattattgtgtgtatgtgtgtgtgagtccatgaaatgtgtgtgtatgcacatgcatctagataccacaggacaattgtgtggaatcggtgctttgctttcatctttatataggtttcctagaacaaacgcaggtcaccaggctttgaggggcatggcctttactcactagtcatcttcctggtccctgacatcctatgtttgctatcagctgggtcatgaacctgttggactcagtttcccttattggttgttttgtttgtttgtttttttgttttcaagacagggttttggagactatcctggaactcactcagtagaccaggctggccttgaactcacacagatccgcctgcctctgcctctcgagtgctgggattattaaaggcgtgcgccatcactgcctggcctagtttgcaacaaggcctcttagtccttcccaaccagttccaccaactcgagacctaagtatacaaatatatgagcctacaggaaccattctactcaaactactaaacagcccatctgccattctgacatgtttacaagaataaggaagaggctagttggggtcagaagtatcaagtcggtatggtgacagctatcacccggttatgcctttgctctgaaccccaccagggagagaggtattctgctcactggccctcctcgttggcttattcatctgataagattaaaaccttcagagctacagttgaggtagggtgagaaaaatgtcccccgaaactacaaaacacagcccaaaacatggcatggtaaagctcaggcaagaggcttggaggctgatgtttccaatagttccatgaccctatgacgccctttggggcctggtgacctcttaaagtggctatcatgccgtgacaggtcatggccaccaactgtgttagcgaaaggccttcccagcatctacaagccactcctgtcccaataagcatctctaccaactctgtttgcaccagcaggggccagcagtacaggcacacagtagtgccccatctaataaagatgagaggccagtcctataggacctctcctacactggccatcttgggtttcttttcaggtttaagtagcacggccagcaagacacggctgaccagcagggctgtccatcctcagggatttctcaaatacacgatgagccagacacgaagaaagccccccacgtattctggagcatgattattaccatagcactcagatggctgaggcaggaggatttggggctcaaggctagcctggagtacattgtgagacattatcggcatagaagaagaggaagaagaagaagaagaagaagaagaagaagaagaagaagaagaagaagaagaagaagaggaagaggaagaggaagaggaagaggaagaggaagaggaagaggaaacagtaaggaggaaagagatggggtggagagagggagagaaaaagagaataaagcaaccctcagaaggacatagagagatgcagacaaggtagggaagagaaatctaggcagaggaaaccatagaaaccagaggaagggcatgggtgggcagagctccgtagtagacctattactggttagattgagggcaactctgggttccgtcctctgcacgccagtgaagaagagcaaaaggaactagagaatgaaggccttgtcgtcctaagaaaaatgccacagagagtgaagccacttcaaataatgagggccagatatttagagtaagtagggcaagtgtgggaagggttagatacttcatctcttgaaagaaaaaaaaaaaacaactaaaccaccaacagctgtttctagctctgcccctcactggctgtgacctcgagtgaccggcccctctcatcctagcggggtgccatggaggaggactggatgatatagtctatgtagaaatcatcaagtaggctctgcctcagactgcacacctgacgtctgcagttatgacgtgaaggccctttctcagggctctcgctgtgagaccacgcaggagccactctgctgcctgtggacttccttcccgccctccctccctccctcaggaaacctttcaggcttcctgaattctcccaggcctggtcttaatttctctgcttgttaagtcactctctaaatctgccaagagctgttgtctttcttctctgctgctgactaggatcctgcaagggtccctcaggcctctctacagttggtcttctaggtccctccgtggatagtgagcccgtcagtgcacatgtatgtacgtgtgactacgtcacgtgtgcacacacgcgtacgtgtgaacgggtatcattcctcaaatgcaatccacctgttttatttcctaggagaaatggcttctcaatgtcctggaactcaacgtgtagtctgtagcctgactagcaagtcttccggtctctggcttttccatcatggggttgtgagcacgcaacgccatgcccatggattctggggattgaactcaggtcctcaggctcgcagggcttggcatttcaatgattagtctcattggcagtgctttcccagctcacgaggacacaaggttcccccagacgccttctttatacctctcctcacacaaccagtatcccatcttgtcccagagcccagccagccctgcgcccacctcataatccgggttgttggtacgaggcaggaagtttctggcagttgaccaaccttggaggaaaaaaaaattagcccttacccaactttaccatggctctcccatttaaaaagcaccaggacttaccgctcactgtctgagggctgcatgtcaattaaccaacccatggaagggaaggaagtccctctggtcccctgactataggcacaaattcactttcccaggaataagcaaagtcacctgtgggtacctgcaataccagatttcctaagtaacacaaaacttagtcctctgtaacgtgtgcaatgaggactccttacagctccaccataccttctttccttcacagctgttttgcctccaaggcatctggtaacaacatctccccaaattaatgttctactctttccaaagaaccgcacttgcttttcagggaccgccacgtgagaaactccagtccctccatttatgtaataggtaattaccaacacaactgactcttggcaaggacacaagtcagctggcgactgctggcgttccaggcacaccagtatcaatagttaacatttaacgagtgtttaccatacatccgccaggaagccctgctctaagccttcctgtgtattaactcattcacctctcgagaaaaacaggcatgcggtcagggattatcaatgaagcaaacaggaacattgaaagctaatgatcatacaggcacagagaagcccaggtaatagctagaaaccacccccctccgtgcttctgcaagcaagctccagtaagttcatgggagaacacacacacacacacacacacacacacacacacacacacacacacacacacacacacaccgtgctagtaacagcagaatcattagggttcactgagacaaaggaggatttggcaggagtgagggggaaacagaagagggtatagagaacgaaggatcaaagtagcacagttgcacaaaccatatccagatgaaacctattactatgaataattaattcatgctaataatagtttaagtaacgtaacaggtcttttcctgtggaaaagggggcttctcagtacagctacgcagcccagatccttcatagaccagggccttagttcgctttacaaaggggatttgctgtatcacagaatccactggattgagccagctggaggtcagttccgagttctagctattcatactcttcctgacagctgtttacaagggctggcaatccgtacatgaccgatgagtgtccgagaggctgggctggacgttagcaatgagtctatgagtgcatgttttcatgccgcaatgactcaggcgctttactgtgcaattccctgtgggacgagtgttttcaggatcgcagatgtaaacgcccctcaccgtgcctgcataaccagagcctgagctgcggatgcagggtagagaaaaggttttgtttaggggtagggtagggtagggggtggggttagccccccccccccccatctgtagatgtgtctctttgtttagtcgctaggagaaacatgctccctgcctggctgaggatgcttagcaagtggcacatgacttggaagtcacaagctggtgagagcaataaagaagaaaagactaggtctgggacagtgggacatggggtgaggacttgggcggttcgctcccattcctaaacacaccaagtccccaagaggcccagacttttggatggtgggtcaggtgaggacttgagagagggaccctgcacagaggacaggcagctccctgaaaggtcacagaaaccagataccctgccctgggatcccagcctggtgtactttctgttgtctcagctagagaggccatcagagtccagggccctccacttggttttcttagcaaaggggatttgctcaaaggttaggaaggccctcaagttgaaggagactgggaaacagatccaaggaaagggtgaagcagcacccatctccaaatccccccacagcccagatgaaaaacatccggaagccaatttgtataacagaagaaggtgaaaaagaaacaggttgttggtatagtggtatggcccttatccaggctcgctggaggcaagaggatcacaggttgaaagccagcctgggctacagagccagaaactatctcacaaacaaagataatagggggctgaagtacatgtcgcttacttagtaaagcgcttgcctagtgttatgtttcaaacccaggacggggaaaaaaactgaggttatttaatgtaatgaggcctatttaatgtatcaaagtggacctggccgccaggttctccagcatccttcagttcctacctgttacagggtatggctggcacaccccaccctctaccctgaactcccagcccaggggctgggctgcccttaccccgaaaggctcttccctatataatccaaacattttggttacctgcccctttttgtacctttggcctcctggctgctgtgcctggttccctctctccctccccgaccccccccatggccacctcagtctggtcatgtccactctggactctcccagatgtctctgcctctcgatatgctctctccaacgtctacaataaactttctcctccaccacacctaggaacagtcgtggtgttaggagccggtgcgtatgtaaggagccattggaagctgtgggcatgcgcaatgggtaactttgtaactttccttttcttgctatttcttttgttactcaggcctgggtttgatcaccagtaccatgtaaagcaggcatggcaaccagtgcctatgatcccagcacccaggagctgggggtggcaacacactcttcgtgtacaaggtgctgggttcaatcctcagtgtcaagttaagagagaggggggagggggcggggaggcatgcatgggaaaagaagacggaactctctcttgaaataatcaacatgagaagggagccaggcattggtggcgcttgcctttgatcccagcactcgggaggcagaggcaggcggatctctgtgagttcaaggccagcctggtctccagagcgagtgccaggacagcctacaaaactacacagagaaaccctgtctcgaaaaaccaaaacaaaaaacccaggagaagggaacacagtttactcccagctctttgacctgtagcagggtgacctcatggggacatgctcacttcacaacagccttgatgcttcctgaggtactgagacaggggatgcaaacagatagcatctggttggctctgggggcactagttacccagactcagtttcaatgacacctgtctctaagaggaaggacgacaaggatgttgaccccatctcccaagaagtaccatcaagaagggggcgggccaacagtggtccttaagtggttagtagtctctaaatgagtggttctcaaccttccgatccccaaccatgaaaccatgtcattgtttccacgaaactgtaatcctgctactgttatgaactgtaacgtaaatatctgatatgtctcacacacacacacacacacacacacacacacacacacacacacacacacacgaaatccacaggttgagaaccactgctctatattgtgagggcagttacaggcaatcgccaacagggagtggatagacaattcaggtgctcggagttcaccctctgtgtctgggtcacacatgcacctgggacatcacctcactttgctcttcgaatccacccacccaccctctcgagaagctgcagggactctatgggaggcaacagccagaagtcctttcttcaccaggccgtctgccagacttgtatggaaggctgactgtgcacaagtctgggatgtggaactcccatgaagaactcatgtccccatgccctccctagcctctagcacagtggttctcaacctgtgtgtgggtcacgatccctttgggggttggatgaccgtttccccaaggtcacctaagaccgcaggaaaatgcagagatttgcattgtcatgcaaagttacagttatcaaggagcaacaaaaataatttttttacagttgggggtcaccacaacatgagggactgtggtcaagggtcacagcatgaggaaggtggagatccactgatccacactaatagctgtgacataacatgtcattgattgcaatggataattcttggggacccagggttcattggggagcacgaaaagcaaattgtcagggccgtcgtagatcttgatggaaataagattctgctatttgcactgagtgaggttccagaccacagagatggatgtacgagtgtctatttgctcagcaagtgtccagagaaaccggcatcaccaactccataaggcctcttccctgtgactcttctaggtgggggaacacatatgctccaacactaactcaaagccctacaccaggatggccatgacttggctttgccatcccactccacaaacagcttctgtggttcttttctctctacccttagctctggttgactccggtagttcttactgtcccgggctgatcaacacagatggatgaagctttgatggctttgaaaatagaggcaaaaggcagagctgcagtgaacatgaggtctgaaagcaaatgctggtgttctcatcagccagatagctgactgcccactctggaacacaggctttcagattccatgggccaagcagagctgctccttagaaatcccgtttgtctgtgctctcccttgtggggggacagggttggggagtctaatccagcagactttctgaatcactgaactgcttcactgtgtgaggtggctagccattggaaacacaggctccactctgcccttggccacccaatactgaccaacgggacagagaggaggtctgtttgggccagacgccaccaccgcatagagtcagcatggccagcagacgctggagctagcactggctgaaggagtgcaattacgtgcctcccacacaaatcagatccaggaaacggaggtctggaaccacaaactaaatgcccagcaaggctgacccgcctttctgtttcttcccttctctccttctcagtttttctgcagcaaagccagcaattaggaattcgacagcgcagattcctgtggctcaaagggacgtcttgaggttgcagatatggaccgatccttcacaggaagacaagcccatcatcctagggttcttgcaggagaggcctcacccttggtagaggagtctcaagaggttgccggcctcctccgtcatcgttgcaacagcctgtactttttaaaaatcgtggtacttgctgcatttgagcctcttcttttattcaaatatctctctcctactcatgtctgtggatcttcgagacctacgtccattatctttttttctgtcttttcctggctgggccagaggcccggtctagaggactggttggtaagtgcaggtgggtggacggataggtgaacacatcagaggtcagtgtgtagataagagggatggatggacttacagatgaatgtgcacatgggtgaacgggtagacaatgagtatatggggggtaagcgcacagagaggcgagtcaagcaacagatagcttagtgggtaggtacgcggatgagtagaagggtggagaacgggtttgcggatggatagatgcacgggttcttgcgtgggcgcagaaataagatgggtaggctcacgaattgatgggagtgtggaggaaaacgggcaacggacagaaggggaaataagtaaattgagtgagtggtgttcagacggatgggtcgaacggaagaattgagaggtggggaggctgatgtgtggatggagaggcggacagatggacggatggacacacgagaagagatgcgtggatggtagtgtacaaagagacagaaatggattgcaattaaaggttgccaaacatgctcactgtagaatcatgggacgcttgatctcaacaccactcccgccatggcccccagtatccaggatgccgaaacaagactgctttgtctacagtcacatgggaaagtgtccgcagtaacagctagggctttgggctgcttcagtctaatgggataaatgacagcccatccccacagtcaatacacaagctcgacagtttgtacacagaggggatgctgcccacaggtctgctaagtgctcttaaaatacctgtggagtccacagaaagagagaggcgcaaggaaggaggccttctgttttctctagcgatggcccaccacttcccaccaagaatgccaggaatgtcagttctttttgcttctgccccggactgcacacctcaccaagaggttgcgggatatttggagttttttttggattctggagtttagatctgctctctgcagaatatacaaaatatttgaacttggtttgaaaagggaccagcagtcagtcagtcctgtcagccttcagctggtccagcagccaaacactttctgtgtttggggatatgatatggttcatcaaacaacccaaggaagccactggcgagtgttctcatgatcccctgtgtacatttggggaaactgaggtacaaaaggtcatccagagcagagtaaggagtaagtacaaaaagaaaaagcctttggagtactatagcgtggagactaagggtaccacctccccaggtggcttcaagggctcaggaacggtatgtttcccgtttcctccatagacaagaagaaatacacacggcaatgaggcggctgcccagaaagaagctgtggagggaaatcttccctggcacagagacgaagtgtgggcggcctggacccacaccacagtctccactacctcatcctcacccttaagaattagaggggtcacacggatcccccatgtgacatcccttggcctagagcagtaggttagacaggagcagaagaagggggtgggtgaaagtcactgcccttgagtagttcatagctgacaggctgtcaggaaggcactcataccaagccagactgagatacaggtaccaccacagggccgccttgttaagaaagctgaccaacaaggaaacacgaactagtctttgctctaacaagaaagaaagaacaaaggaaggaaggaaggaaggaaggaaggaaggaaggaaggaaggaaggaaggaaggaaggctgtaaaagtgaatatttagggttcaataccactatttactctaaccagtagactcctacacactggagttaagaaaccgtctcatctccatgagtattctgggccggccatagatgacacagctcccaacaggcagctgtgttcccttggtggaaggccgtgagaggcaaagctggccggcctgggctctgccgtcctgccctgcttgctatggaccttgagtaggttactcagcccctctgagcttggctttcgtaagaaaggggtgaaggcaaaagcatggatcccgtcgcacacagaaagccctcggaagaagcctgggaagtgcttggaaacatagctagctgttatgacatgatttgaaacaaaaccagcacttcccccacaagagttctcctgggtgcagatcgcagcactgtgcactgaatgtgggctacaaacaagctacggcataacgaccctgaagaaagagagaggccccagagctcatctagtcagggcactcagagccagggctctctgaaagacagtttccctggaccctgcctcatccaccagcctccccacaagagccacgcccagcctttatccaccactgaacatgtcccacccagaacctgcggtgggattcggttgaaacagtttttaggacagaaagctgttctttctgtcctccttcagcccaagataagagaaacttgaggccaagggagctaggtgtccccaacggcaccttcccctagtgatgatagagagaggatcacaacttccctcaatgacaccccaagaagtacagaggtacaggaagggggtgccatcgcacgctgcttcggatccagctccaaggctgggtctttgataaattcctacacacggtatcccccagcacaattccccatacagatccaggcatctgacgcagcccaggagagcactgtccagaatcgagaatgtggtcgccaaccagaagtttcacagcgggcagaacaaagctccaagctactattcagttccaagtcctgccctaccccaattctggatggtcagagcaggacagaggagtcaccagttgagggtctagcagctccaggttctaggcttgtctctgggactgacaagctgtgggggaatcaaaacccacatttccagtccgttctccaagctcctgccagcaagcctgcctgaatattctagaaatgtcttgaagcgattcccgttagttttcaccacgtgcaaatgtcaactaaccagccaagcaatcaatgttggcatccccacacctcctcgggaactctggtaccacagttaacagcaccaggtttagagcctggcactggacctagcactaatcccagctcagccactttcagctgtgtgactcaaacactacacttagcctctctggtcttctatctttctcattgtaaaaatggggtaattaattttaacgctgtattctcctatggttatcataggagttaaattatatgtaacagaagaggcttaatttcaattgcctcaaagttaataagcactagacaaatgtcagctatgattatttcttacgaagctaattaacagtatcaggaaacgatttaagtgagttgatctcactggtgagggcttcgtgtaccagtgcgggggagattcaacagcaaaaggagggcagcaaggaagacaggattggagaagtaggcaggagagcaggaagggatttctgcttctgtgtacaagtcacactcatacacagcccagccacctcacagaccggagtttcagatatgctggatttctgttccaagagatatgactgccaggcggtggtggtgcacacttttaatcccagcagaggcagaggcagaggcagaggcagaggcagaggcagaggcagaggcagaggcagaggcagaggcagaggcagaggcagaggcagaggcagaggcagaggcaggaggacctctgtgagttcgaggccagcctggtctccaaagctagtttcaggacagccaaagctacacagaaaaccctgtctcgaacgagagagagagagagagagagagagagagagagagagagagagagagagagatgataatttaggaaggccctttaaagaaaaaattttaaccaaaagttctttgctttggttcttgaaatttgaaataaataccaaagggacaaaatgacactacaattacaaaaaaagaagaaagaggaggaggaggaagaggaggaggaggaggaggagggaaggaaggaaggaaggaaggaaggaaggaaggaagcatagcaacagcaatagagtgtgtgtcagtgatacagcaatgggccagcattctggagtaggccctgtggtcatactaagaaccagggttggtgtgggggtggggagttgcacagccatgaggagggaaggcagttaataaagagagaaataaaaagcagacagataggaaatttgcattctcttaagcttgctgcacattgcttcaggccaggatttcaccctgctttgcaaagccatggttctgactcgaaatctgatctccagttcctcctcaaggcagctcagaggggcctgttggactgcaatgtcagcctttaaagaaacagtccacacacacacacacacacacacacacacacacacacacacacacacacacacacaccatgctgcagatacacagaaacctaacaaataacacccacaccctgtgttcctctggctctaaaactcacggcccaatattttcatcatacgcctttcccttgagttggctggtctctgtgtcctcctggagaggaaccaggaatgctcacacacagcccctctccagctagcttccttcctttcttccttcctgccttccttccattttaatttttctaagcctaggtgcctgttacagaatattaccttaagatgtgttatatttgtttatgctgtgtaacatttaataatgcaaaaatgtgttgcattcttttacgttgcgtctgttttaactctgaagctgtgtcgatttgcctgtctaaaacaactgattggtctaataaagagctgaatggccaatagctaggcaggagaaaggagaggcaggcagagagaataaataggacgatctgggaagagagatagcggagcgagcaaaggaagagaggagaatgccagggccgagccacccagctacacagccagccaaggagtaagtagtaaagaacggtatatagaataaagaaagataaaagcccacaggtaaaaggtagacgaggcaatttaagtgaagaaaagctagctagaaacaggtcaagctgaggcccgacattcataagtaggaataattctttgtgtatttatttgggagctgggtggtgggcccccaaaagaacaaggtgtaaagagtaaaaaacaaaaaccaaaaaacaacaacaacaacaacaaaaaacaacaagtgccaatgtgtatgagctggatttgaacctcctatgtagcacaggttggggtgatcctcaatcccaagagctgaattacaaatgcttgtctccaggcccagtaccacggtggttctgaaaggtcccgtccacccagcgagtccctcagcccacgcctgcacctactcatcatggcaccagcaccacctccagagtccttgaagcaatctccaaaggaaggcacttccatcacccccactttgtaaatggggaacatgggcttggagaagacagaatctaggcccctgtgctaattagttagcaagccacctactcaaagtcaggttaggttccctgggtcctggcccccgtgcatctttgtaaatatctttctgctacgttgctgctgattcactgaatttgaggagcaggaggcaggactttggggaaaggacgctgggaacatggcggcagtcgctgaatctctcagtggcgctctgccgtcagtcacaaacagcaacagtgagtaagacggcaaagtggcctgtgtgctgcactacacgtttgtatccttttgtttttccgagacagggtttctctgtgtatccctggctgtcctggcactcactctgtagaccaggctgaccttgaactcacagggatccacctgcctctgcctcccgagtgttgggattaaaggcgtgtgccactgccgtccaacttttcacggacatctaaaagtatcaaacaaggttcatgagatttccttggcaaacatgagctcaccccaaatgcagtgctgtgcgtgaatatacagtggacccaaacctactatttcttccgggaaacgttcacagtctcatgggagggacctggaagacaagggcacagtggccactaagagaccagagcagctaactctgctagagtagccacagggggcttcacagacccccatcgtctctgggtttgaaacagaccagatggagagttggagaaggaaagatctcagtctgactgatggcagaaacatttacctttggggatgtggcccaggtacctctgacacaatgtttcttactgtttcactagttcatacaatatggtgactcttcactaacccccaaggagtctcacagagagttgtgacagatgccccctctccaggtttccaatcagaagtcccacgaagggttaagtgaacatggaaagatggagaaggcaaacacaaccatgcccctaacagaccagcatcctgagagcatgaagcccaggatgccaagaatgactgtgtgttgtagaactgtacgaaccattcacctcgatttatcactcaatgaaagaaaaatagggggggagaaaaaggcaaattccaaaaagatgaggcagccctaaagtcaagatagagaatgccatgaacaactcatagcacggaataactgaaatggaatttcctccccgtcactggaaggcacaggacctcaactccagtgaggggggccctggagccagccacgtgaatcagccccttgtttgcagttccagggagccggtgtcaggaagaggctgggtgtggaatgtgtacttttccctttcttcagctatcacccttcccccgccgccaggccaagggtgcccctcttacgtcctcagcaaaccggtggcttggaaacccccacatgcagaatcgctgaggcattgttcagaaaacgggggaagacctttggggctggggatgtgagtcggttgcttaaatgcttgcctgtcgttcgtgcgtggtgaagaactggatttgatgcacaacactgcatgaaaccgggtatggagggtgggccatgctgtaatcacaaccatcacgaggtagaggctgggtttgaggccagcctgggatacctgagaccctgtctgaggaggaggagaaggaggaggtggggggggaggagggggagggaaaggaaagagggatggtttaaactggtgaggacctcaatgggctctgttcattggaggcacagtgtgatcagcgaggaatccagaagagcagcctgaactgtggagcaaggagcaagcttccccttccctcgtcctgcctgcctctcctgcacagcttcctgtcagtcccacctgaacacccggctggcttaaatctcgagacagtggctgtaaacactgttcctgtcactcgcataggctgcaaggacccagcctcttgccgtcttgaggcccctgacgtctgtgcacctagaggcagcaacctgccatctgggcaccgaatgccgggcacttgtagcaagcagtgacgtgggagagtgtgttcagacgttccagggaaagaatgtcaccttagagtccttgctagccggggggctggaccccacccccacctccagcctccatttcaacactagcaatatgaagattatacagccttgacctttgggaaaaaattaaattggccttcgaaaggtacagtgtgggtgttcgatacaacagaagaaccgtgcgaaatcctgaccatcagagcccacacagctacctcttcagccctcacagtcatgactttgacatttgatgcatgcatgcatgcatgaaaagcacaccagcccacagaggcaccggcaagacattggcttcaccaagcaacaaaacagggcccactcccctcagcctccccctcgtctaccatgggaagcagagggtatcagtcatgttgcttaagccatttatcactggttcatctcaccaaaggggccaatctggtcagcctggcctgcatctcccccagttttcccttccccctgctgtttgctgttatccaaacatctatcatcctcaggaagactcaaatactatgtgaattcacaatgtactgtcaatgaaaccctcccagccgtttggaggatttatctttgtgctaaatagagaacaaatgaaacccaggaatgtcctaattaactccataagcatcagctgggtattgctgcccccacccttccccttgtcttactgctaatcaataaagacaggggatctacagaaacacaacccagatagttactgctagggtctctccttgatggcggggcaagggaggagctcccatttggaagaagattggcccagctcatcccaagagctgtctgccatagactgtgaccatctgcaagctcctgaccctctctgtaaggtcacttgtaaattggcagccagaagaatttaaaggcaaggctttgccaagcccttggtttgtgttgtggttgtcctaactgtattctatttaagcccaaatgcttgccccaaagagaaaccgtcacagccaaccttgtagctgtcttgggaggactgaggtaggactgagtgagaaggctaacctctcaagtatcagtactctggcactgtctgtccaactgcttctttgcacacgagcatcccacacacattatacacacacccatgaggacgcagagtgtctcactctgatggctcctgggatgactaggtaacctttcttctttgttccttcagagagcagtaggccgcccccctcaagctccaggagaggccccagtaaagcctggatgcggacagagctgctcatctcctcacgctttgtgtctcagacgaagcaaaaggctgagaccaacagttgtgttgactggtcacaagacgacggcaggaataacagctgccaatctgagcaaggaatgcacgccacactgtaagcccagacctgaaaggctgagaagggcctgtcaacacgagttcaagggcagctggggttacatagtgaccacaaccataaaacaaaagaacgagaaacacgagtccagaagcaaattcttcccccagtaggggcctccgccaggcatggtattaggatgtcacacaagtgatgcaccctcaatagccatcaagccccagtagagaccgtgaagctcagccaacagaagagtaggcccggctgatgccatctcttaatgtgccaaatagaaaaaggggaatatgcctacataccaactcgtccttgtgcctcaaagcagcataagacatcaagccattagacaaaactggtagagtccatggctcggggtgtatgtagaaatttttcattgtgggggacacttaaagacggtgagaggagacatcacagaacagttattttcccattagcaaccctcagtgttccatttctaatcatacacacacacacacacacacacacacacacacacacacacaccacctctctagttttccatatttgactttccttttctcttgtctttccataagcaattggtctgatgccccctgcgatgtcctgctaggggggaccttcagtcatcttttctctagtgctcctgggctgagccaagctgtggagtttcccagagacctcacttcccactgagacggctccttgtgtagtcatggcaacctcacctctctgcccaatgaggcaagcctttctccacatgcccagggtacccagcgcatcagatctgcaatggtgcctgggaccttcatgcctggattggtgaggtcagcaaaactgacacctcgagtggcttatcaggaccctaactgcacactgccttttctaaccccagccactgatccctcttttcctattcttgcaaaaggaatcagcatgctgctccttccatgccctggctgtggagtgtccctgggtacttacccagtttagcccacacagtcataccctgagtagtatcgggtaccagaccccactgaagggcacaggaacacaaaagcggaccacccactcctgcctacccaagaagttccctgatcccaggaagaaggaactcaggaagcaggtgaccctacctggaaagccacctggccacatgtaggaagactgcaaatatgagtcctccatgctggcctcgtgtgaacgcgttctgctgtgtgtctagacatgcactgcatgttctgctcacaaaagcaggatcctacaagtgacccccagagccccggatgaacagacaccaccagcacccttgccaagcccaatgctgagtgacaggttttgcaggagaccgtctgccctgtgtccacttgcctaagaactgctgaaccacacacaagacatggtgtttcccagaaaggcttccacacaggtctgaaacagaagggcaagtccaagagtggggcttctgtgaactccacaggcaggacagcttctcacgtcttaggttttgttttcatttatttcttcaaaggcgctggcccaaggcaaacaagtcacatcctggcatgtgttgatcctgcgggtgggaacagtgcgtttgttaagtggctctttgtgatggccactggcttggctagataactcacattacacagagaaacagcctccaaattccacagcaaattcctgaataaggatagactttctggaagccactggaagatgaaggggcccagagagcttggaggattcctggtgtcacagaaaaaggcaaggaaggctgcagggtcctagcagtcacaaccactccagctctgaggtgggtaaagggctgcggcccgtaaggaatttgccaagccaccctctctgccgctggaaactcctctctaacgttctgtgcagctgtcactcaccgtgggtctccagcactttcacgtgcaatgactcaaccgtcctctcggcgtctacccaagtatcaccacacctggccagccaccccaagtcaggaccttcccaaaagtcctaagaactgccttcgctgacttgaactcggaacctggcaaagtggtgttggattagggttttgttctgcatcaggcctgaagaagagagttaacctggctggtgtccacttcgtgcgtctaatttctccacagccggcttcaggagagaggaggggaaggcccagggaggccaactgatctaccagaggccacacaagccaaggaggggctgtagttcgttgatcccaggttttctggtatcctgactgctccctgtagcatttctccatctgtagaattctttttcctattacaggtctttttgtgtgtcctagacatgccacaaaaaagtttctggtgaccagggatgaaaaggaagctgagagcttgtggctgtttattcttttaagtcatcaggttttccactgcaggcaagatctttggctcggtgactatgagccttgcttacccccaaactcactcagagacacaagggcttggggaaagggtgggaggtcatagagatggcctcctggaatctgcctcctttgttagccctgaatattgacaggaagagggaactgtgtgatgctcacaccaacaggctgtggccagaaaaggtcatcagcctcctggatcttccttggggagacactggcaggccagccctggtgcaactcagaggctgtggcatttgcagattcacaaagtagagcccagtggaaggagatgaaccaactatgaatgggcaaagctgcatgcgaaacctggctagttttgctccaaagctaatctttcaaacgagcattaacacttgaaaaatggacattcaagctgggtggtggtggcaaacgccctttaatcccagcactcaaggcagaggcaggctgatctctgtgaattcaaggccagcctggtctccagagcgagttccagaatagccagggctacacagagaatctctgacttgaggagcgggggtgagcatgctaacataacttctctgaaatgtcacatgtactaactgtttataccacagcttaacacacagtagacatgaactaaccatgtgaaggccttcttttatatttcccatgaaacccaatgaaaacgctgtccatctgctgtcgccgaagccctcacacaaatattacgtctcatagcaggctgccctagagtgtttatgatccaggagaagttctcttcaaagacaaacgggtttccttacttaaaccaaggacaaatgacagcttatgggcccttggccagttcttgtaaataaagttttattggcacacagctacacccactcatttacatactgccacgggctgctttccagaagcagaagtagtgtggatgggtggtagggaactgtggggttcccaaagctgaaaatatttactctccagccttgggtaggaaaagtttgccaaaccttaatttacacacaaatataagccactcggcgtgctgtgctaactaggaagcccagagtgagattgaacactaaatctcccagtcgagataggtcctcaacgttttcttagttctctgcgtctgtgtgttttgatcttccgattctgcttcaacgttttacttaaaaatagctaataatccctgagtacatgttctatggcaaaaaaaaaaaaaaaaacactgactcaagcactcatattcgacttttatttaattctcgtagcaaggctgtgggggagacaacgcctccaatcagaaatgaacaggggagatgacgtcagagctgactgagcagtgggagtgtttgctatgatgtgattcagcccagggtaatagacagactgactggaacatgctgggtgttcattgtgcacacgagagtggacagggcctgcaaccaatgcctcgagcgattatgagacgctctcaggggctggaaggacggcctagtggttaagagcactggctgcacttccagaggtcccgcctgattcaatccccagcaaccacatggcaactcacgactactgcctgacactctagttccagggtgtcttgtctgcaggcagtgcaagaacacacagcacagacatacgtgcaggcgaaacacccatgcacatacaataagcatacatgcaggtgaaacacccacatacatacaatagacacacatgcaggtgaaacacctatgctcatacaataaacatgcatgcagatgaaacacccatatacatacaatagacacacatgcaggtgaaacacccatgctcaacaataaagagggataaataagatgctttcggtagggtgggttttctgttctctctctctctctctctctctctctctctctctctctctctctctctctctctctctctctctcctgcagatcaaggtaaccagccacctcataaggaatcttccagactcagagaagcaacatggcccacagtctcacaaagacactaaacgggacctgtaactacccatgtcacagactctgagatcctgcccccgtgatgccatgggctccccacggctacagtaccacaccagtaaacagtgacgaccaacactacctacaaatcaaggccccttttaaggctaagagaccctacctgtattctggaggtgaagatcgttcttcgttaagttagattcctacacacttagcagtgatacgtgaaacatcagaggccttgtgtcccggtggcggttctttacaaatttgttaaaaagcacacacatatatattactttctctgaaacaggtttgcctgcctgcaaccaaagtcatctgcagtccgcaccaaccccctctgagaaaaacttgccaagcagcagtggggaacgggagggtgtcaagtccaagtccaaatgtaagcctagcttctgggacctccaaggagaaccaggatgaccttggcagctctctagatctctctttaccttggtctcttcaaatgtataaagcacagggccacacccaccccaccagattgggtggtccagcgggctcagtccggttcatagacaaccccacacagagcaccaagagccctagagcagaaagaggatctggcttttctcacttcagatctgtgcagacgccctagggctcccagaacccctatttggggacaggtccagggtgctatgggctagctccagaagaagaggccagagtatctaggggaacagccctccaaggactagaacatgtgctcccatcagcccacaagcccattcaggaaaatcagtctcaataacagcactcaacagggcacatggcccgtcaggcagctgaggaatgattgaggaggggaaccagaaccagaaatgcagcccattcttggagccacaagagggaaaggcggagaagcccggggccttagagtcaccagtaccaacatcaccacaaccggtgccagcagtgccaggacaaccagtgccagagcggcagcaactccagaagcttcagcaccagcagcagcagcgccaggcagtaacccagagatgtctaggagtgtctaccccatggctctgttccggtgcatttgtggatcaatgtttgccatgcatcctgcccagaggctgatggtggtatttgctacatccgtgtctacaggacatagcctccagccactgacttgtttctcacaatatggttctgtttttttgtttgtttgtttgtttgtttgtttgtttgtttgtttttgagcctgagcccaccctcaccctcttgtgagaattaggagataaaaggaaccaccacaaaggggtttgttctagggagtcaccaataatcgaggagaaagggagctgtgagccacgagataagtgaggtgcagctgtcacagaggcttcggaatggggggtatgaagacatgaagaggctaagagcctcgacagcccctctctgaaacgactccactcaccactccagctcaggcagatccataagcagggctccaaacaccccatccaacagattccccctagaccatgagtgactaactaagggctgtgctcccagcctgatccagttccagcaccattcccagtcctggtgcccaaggcctgcaggagtccctaaaatctgtttactccggtggagaaaagaggactctaggttttaagggtttaagagcaacgataagagtaagtcccaccacttacacctccaaacccagaagaaagtcttcctccttccactgaccctactggtcctgcacaaaacactacgcagccaggccagcttgcagcttggccttctcctaaatacatacctaggcaagtcacaagccttgaggttctcagctatagcgtggaaacacacccagccacctgaggaaccgatggtctaagctacatagctgttccgaaggaccacgctcctattctcagtgggggctgtaagaaagccacaatggccatcatctcctcagagcaactctgcctctgcaatgtgcctagcctttaagaaagacagcaaggctctcaggctcgcagcgcataaagtcactgtacataccaaaaccagaggactctgcttgcatgagccattctagaaggtctgcctaggtgtttatctctgccactctagacctagaagcccatcccaagcagaccctatctcaagtgccactttgggagccgactggtgatctgagcactgcgccacttcctaatggagctatctgccactctcctttgggtagcctggcactgccgtgagcacccctgggttctgccaactttgcaacccctgaggggccaagcttcctgccagtgaactgcacaaccaggagggcctcggttgtggagttcactactccctcctgtcagctggtagaaggccccttttccttgcaggttgcaggcctgaagctcagccttcccgagggcttcaagaaatatgacccttatggcactgtccaggacaacccacagtgtctgctgccaagtctcacactgcttaccatgctccgctcaggaagttttcagggcccagcagcattcaggctccccagaagctgccctgaccctaggccaagcttctggcacatgctctccaggtaatgcctattttgtgaggctccattgcagccctatgctagaggaggatactaacggcaaccatgctgaagtgagtcacacggggtggtagagatttaaacccggaacagccaagtgcagacacgcacgcaggtctcacgggtaccaaccgtctggtctcaccttgttcccagctctaggcacagagccaggaaatgattctattgtgtttgactttcctgtgaaagtgcccatctcaatgccttatccgtcacgtctttatttaccctttttactgggcgagagaccacatgccaggtacccactgagtctcagaggcacagacaccctcctcaggccttggcctttagagtacttacagtctagaggacaacaacagaaataagaacttacaattgaaaagtacccgtcaacatgaggaagtagggtggctccagggcagattctcattaatgttattttattattattattattattattattattattattattattattactgggttgttgttttcttctgttttcattgtggatcggccctggtggtcctgaagctagctctccaggctggcctcaaactcacagagatccgcctgctggggttaaaacaagacttactttctgtctttctcccataggttcccagaatcacacccgatacataaatggacacagaaaacagcagatcttttcctaatagctacatcaacaaagacctctcaactaccagccaggacagcctggcctaaaacacaaacactatatcaaaaggagataggtcttggggacttacattttacagagagctccaggttgaccgagagatcagagtaaatattctcattgagtcaggggtagagatccagtcttcacagctatggtccttgtccccggtgggcatccagactccaagaatccagtaggccatttgtagcatcccaaggccagccaggtatgttactccagagtcaaaatctgtgcagcattactccctaggcaactgcatcttactgtaaatccacagggctcagagaatccccacgtgaggctccatgtagtctgcaaacacagcctgctggagggcatcttcttaccatagtcacgttgaagccaggcctgggacaagggagaaaaaacagtgttggtgccatcacagacaatagcgatcatcactccttccttatacttgacactgacctgatcgcagagaaaggtgctaagaaataccgcctgtgactctggtacccaaatgcaggtgtgtggaagacctagggggaggggtgtggtgggagaagagccttcagggagtgccgctcagccccttgttcgctaccctccaggcaaggacattttagctgcaggaggatccgcagagctgccccggaggaggagagtaggacctgactgtgcccacggtgttcatggggaacgagttattggtttgcctgggctcacaaaaggccagtcctggcacctagccagactcccctgcagtctgaaagatcccagtagggagctgctaggcttagaggcttagggtcagctggtcggaagtcagtctttgttttgtttctttttaaaggcaaccacataaggctggcctggttccagatcctgccctgctcaacgagctgcttttccaggacagggccgggggcgtgtgacttctcttattcattcagtgattcccgagtccctctcgactggtccagctactatgtcttggtctcctctcgatccagtgcattcgtgttcttccagacatcacggagtttggggcctggacttccccagccacctgaaagcactaacagcccttcacggatcatctttgtccttcatcctgctagaagccctggtctactacatcctatataatgtcccaaccatctgggattctctcacaaagtttccagaataatacccggaggcacagacaagtcaagggtgattcaccctagcatgagagcaaccagaagctaggcaatctgtcttccaagctgagtcccgctctggtgtcctgcgttaccctgtgaggaactacctacccaagatggctatacctaaaaattcacacacatgcaatctcatctcatcttcacacataaacacaaaaggctatgagctattgattgttattatatggtttccaagataagaaacttgaggtccattgcagcacctgggaggagcctgtagtccattcagcctgtcatcagaggggaagatggactgggggggtggggtaattgggtcaggtctgtgatttacacatagcttcagttaacagtcggggaggagaaggggagcgagcactctatgaaatatttactgaggcccacaggcaaatctaaaaccagggttattttgttgtggtcaagtccattaaagttctgtcacctgaggaagagttatctcgtggccggttgagcattactgtagccaacgggtagtttctgaccaagggcattggcagtgtggatgctcagagaaaagcatatcatactctcacctggcagaaaacattgggggtggtgggggtgtgtcttgctgcatgagggcttcggaagtcctcaaacccaagtccttccctcacagacagcattctcattgtacctactgcttacagtccagggaactaaaatcaataagaaagaccctggggaccagccacttaatggagcagcagacaggcattctgcagaagacaattctttcaaggtaacacccatggacactgtgacgtgcagtctacttctgtggagtagaggtgtggcctttggggacagactcttcagtccagtctttggcataagtgcacgggaatgcctgggtaggaccagcaagggacaagcctgagatctccccagcgttgctaggaaaccccagaaaccccagaaaagctaaagaatgcactttaaaggcagaggcaggggctggagagatggctcagtagttaggagccctggctgctcttccagaggacccaggttcaattcccagcactcacatggcagctctccagtaccaggtgatccaacacccttacacagacaaatgggcacataaaataaaaataaaataagaataaattagataaatgtgtgtgaatgtatgtatggagccgagagtgaaggaaggcagccggaaagcctatgtatagagacacatagaaagctaaactactctgagctcttagaagccaggaccaggggtacaagcctagtgatgtgacttcaacccctagatcccatacgaaaaataaaagggaagacccaagtctacaaagtcatcctctaacacatcaaaaaaaaaaaaagttgtgagcctttaatggctgagccatctcttcacccacccccatctgctgcttggtttgtttgtttgtttgtttttaggaaggttttctgtggagccctggctgtccttcaagtcaagagaccagcctgcctctgcatgagccaccacggccccagccaagtgtgcaccaacatcaccaggctatgcacaaccaaataaacagccacatttaattaaaatagcaaaaggaagtcaagatgaagctttgctgagtgactggggtgaccctccgttttaccccggcgatggcagatccagaaccatcaaactgcttgctctctgtgtgcatttctgtacctgtgtaaaaaagtggggttccccttccctctggcagtttctggggctccctgcctcatcacatcatcttctcacagcctactgaggtcagctggtcacgcctggaaggcatccaggaggaggctcaccaggaagcatgcactaatgcaatgaacacagaaattgtcccactggaaaaggcagcctcgggtcctttctcttagctgagtccctgtcctctgtctcccaggctgtcaggcccaaatgtgtcacttccttcttgactctgcctcctggatatttgtcccatctgacctctgcaagcagacgctagtaagcaatgcaggtggtctccatccccctacccagcgccagcgccctttgtgtataaactcccttgaacacgcgtgaactaaggaaagctttgcaagctgcagggtcagcccaaggtgcagtcccccagagaagccaggggacggaaccccctggcacccatccatcttgtgtcctactgtgcgagacttagtatcatcccctctcttcctcaaggacatcttgccgccacatgtaagtccaaacacacatctgagtttctcactcccccttttctatcttctagaactgtctgttaataacagtcgtcaatcctaacgcctgggcaatgtggccaaatgaccgaggtactgactgcaggggctggaaaacagttctgagaggtcaggcttgcccaggactgccctccacctcacttggaaagttaaaattgcttaaaggagacatctccttccctccctcactggagcatagaagactcctctttgtattccaggtcttgtatcccagggagacacatcaggatctgttcccagacaatcctgcagacaaccaattccacctttgcttcgtttcctttcttccccaaggtgctggattaacaggaaatcagctgctgcaggagccccaagccttcgagtacagttcctcctcacactcatgcattcagggatggaatatgaagtgaccagataagcagagtgggcgggacccaataagctatgagtccccacgtggggtcatggccttgtggcctctggcacagcctctgaaagtacctcttggaggcactggagagatgctgttcctatggagattcagaactggactcgggtctcagcacctacacggtggctcacagtcatctgtaattcctgttctaggggatacgtcatccttttgtgacctctactcgcacgaggaacacacaaggtgcacatacatacatacatacatgcagacaaaacgcccatacccaagagcaataaaatcaaatctttaaaataaaaaaggaaggaaggaaggaaggaaggaaggaaggaaggaaggaaggaaggaaagacagacagctgggcattggtgatgcacgccttttatcccagcgcttgggaggcagaggcaggtggatctctgtgagtttgagaccagcctggtttacaaagggagttccaggacagccaaagttatccttctttgaagaaacaaagaaagaaggaaaggagcgaaggaaggacggactgacggaagataggaaggaaggaaggaaggaaggaaggaaggaaggaaggaaggaaggaaggaaggatctatgtttaattaaaagaggagagttctctaggttcatctgttgagatacacaggacagacggatgagtgttgagcatgtagtgtgctcacaacccacacagtgccaccatcacccagggacccccatgaatgaggctttggagatgcaaatggaactctctagagttgctaaggtaacgaaggatgtgaaggtctgccttgctctccagtttgacccactgagaagcaccaggaatatcagcagagcacttctaaagtgtaccagtgagggtgtctgcagggaggattagctaagggggtggaatcggctttgaatgtgggcatttccatcccataggctccagtccgtgtggaagaaacgggacggacagcctggaacaggaggctgctttttcctggctgctctaagagcaccactctcttccagcaatgatcttaggtcatctgggtccatgggtcatctgaaacagtgagctggaataaatctgctatggctaccctaggttgtcagtttcactacgtttggaattaactaaaacccaaatgactgggcacatctgtgaggaattttttttaattattttttgttttgttttggttgtttggttggtcagtcggtcagtcgcttggttgagtttgagacagggcttctctgtatagttctggctatcctggaactcactatgtaggccaggctggcctagaactcatagagatccatctgcatctgcctcccagtgactgagatcaatggtgtgtatgccacaacattcagcctgagagatttctttttcttaatgaaatcatttgaattgggaagacccacttctcatccagatctttagggtgagaaaatacatccttaatccaggtcttttgcgttgggaataccagactttaatctggaccacaccttctgctggcagcctatataaaggacatggacgaaggaaacttggctcccgttagcaaatccattccttcactggcattacaacctacttgttagggattctgatccctaacaagcagctgagaaatccagtctcatgaactgaataacccctggattttgaaccttccattgatagccattgttggactagttggaccatggcctgtaagccattctgatggtttttatcatatacataatatatattctttgttatgtatataacacacacatcttttctgtaactcctgttcctctagaaaaccttaatataaaatcttcttttaaactgccccccccactcaggttcatgacataataaaactgactcacacaaagggtttggtttccttatttacaggactgctcagaacagagctcctgggtgggtggggggtggggggagcactctaagccgtagcctggaagaacagatccgggctagttaaggacttcctaccagcactggagaagctggcaaaggagttaggataagcctcggtgctcagttctccccagtaagaataagacactctcctcaggacacccctctccttcagtacagaagggctcagaggggcagcctctgggccacaggaagttgagagagaaagtagtcagctccctgcaggctggaagaaaaccacaggaatgtcaagggagggctggtatgtagccaggaggatgaggactttcccttacaccgcaggacacagcgagctgtctcatctgcttctaacctgcttaaaaatccaggccaccgtgatggtgactgcccaagctcatgtccatgggtcatcgtggacacgggaggaggccttgcacaccaacagccccaatggagtgaaaccccctgtcgcctcgactgaggcaggaaccggccccaaacctgcactacagctgatacaagcagaatgagtcacaggagtgatgataaaatggactggaatgaagaggactcccaaccctaagacattcattccattccagctatcaccgcacacctcacacaatggccttcttctggacctgtcggtccctattgacttctcattccacaaagcccttttcactccctcgaagccactcccaatcttctcatgatcccttgtgactgaccctaaaactaatccatcagcgtcccttcccagtgccccccaaagcatgacgtcatcgattttaaaccccaaggctgcggtcatctctggtccactggttcagcatggactttaatctgtagaagcaggatgttctaaaacacagggatgcaggtgtgttctcttcatcccaagctccacattgctttgtgtatgctaagacctttctcagtcctaaagcagtgagcggttaggaccacgacaaagcctcaggtccatgttgtctgacgctgccaggcagctgctcagtgttcggggaacatcgtgaaaccagacatgccggcacacatttgcaatccctgtatcctcggatgctccggttctgaagcagggggaccacaaattcaagttcggcctcacttacagaattagctcaaaggctaattagttagcttgttaatcgatattctgtcctgatttttttttctttttttaatcttaagaagctcaggtgagggctgtagctccactgtaagagtgcttgctgaggggctggagaaatggctcagtggttaggagcactggctgctcttccagaggacccgggttcaattcccagtacccacacggctgttcattgtctgtaaactccagttccatggaatcggataacttcacacagacatgtaccagtgagtcaaaaataaaaataaatataaaaaaagagtgtttgtttaacatgcagaaagaccgtgaggccaactatagtcctgcataaaataggtcaaagtaatatatatttggtatcctcgcatttcggagacagaggcagggagatcagaagttaagggtccttctcagttccatggtgagtttttgtgagttcaaggctagcctgagctacatgagaccgtgtgtgtgtgtgtgtgtgtgtgtgtgtgtgtgtgtgtgtgtgtgtgtgtgtccgaatccctaggaaagaaatacactcatagggagagtattacacttcagtcaatgaacaatgtgcacctgaagctatcagtacaatgtctcagaacacgctatgtaaaaaagacagttgccattttgataagatgtaaacaggacaaataatatgtatatctattaggaaatgaactataacaaaataaatagaatctgacgccagggctcagtaagtcaaggtgcctgctgtcaagcattacaaacacccccacccccaccccgaggtcaaccccaaggatgagaagtgaaccctgtaaattgtcctctggtctccatgcatgtgctgtgacctgtgtacccacaggcaaatattcacacatatgaataaaggaacatactttaaaaaaaaatgaataactcagaggctggagagacggcttagtcattatgagaacatactgctcttgtaggccctgagtttggttcccagcacccacatggtgtctcagccatccacagctccagttccaggggaatcggatgccttcttctgacttccaaaaacgcaagatatgcacatggcatatgtacatatccaggcaaagcaatcacaatcatgcatgtaaaataaacaaatggactatagctgtttttcaggcaagagatataacttaagggtggagtgcttacttcggatgcacagggtcctagatccagtcccccacaataaggggaaaaagtcacagatgtctagtggaagacattggtgcatacccgccatgtgcttggcaagagccatggcggttattcatcgtgatgagctagcagaaggtacctctgggaaagaggtcagtggagacaggaacagatcccaagggtgcttgtctcccacagagccaggctctgtcaatcccatgctaccgtctacactgttgctccctgtgcacaccagcgaggttgttcaggattaaccacaatccttgtagtaatctttattcatctatagcttgactgaccatggtctaagccactcatggccaaatagaatataagcaacttaccaacttaacattgattgtgattataattactctatggtaagttactgtcgcgctaatttttgttatagttaacttacaaattaaaagtttatccaacttataatatctggagagggaaaaaaaaacggtgtctaaaggtctcaggaccagctgtggctttaggcacccatggaaggtcttgcagcagcactgcctgcagacaagggggagaagggatgaactttgcacagggaggctgggcggagcaagcgaaataaccaaagtcgtgtgcacagcgggtggcttccgcacagagaacatccgctcttattatcatgagccgctgcaaaatgagtaccaaccctgatggcttctcagccgccaagatgcacactcaggaaagatgttttcagggcctcctggccgctcaccttccaagtcagttaagggagagaaaatgtcattccctcggggacttcaagggtctactagcataagggctgctgagcaggtaattaggctcaaggtaaactgagcatgtcccctgggaagtgctgcgtggctgggaaggggctgagactgcccaggatttctcagaagctatgagaatgcaccagaagctagaagcaggaccaggtcctgggatgccacgggcaccgaaggctgaatgcctgctgctctgtgtcctccgctgacccagacaggacagctgtgcggaccaacaggggagggcaagagagaataggaaagcacctgcttcttgcaggaacacagcaggggatgggaaggaatgaggacagagactgcgccccactgagcccacaaatgaggcaacttgaccaaatgcctctttgagactctgccatctcctctggtggcgggactgtccccactacaacctgaacaaggatatagacatcaggttaggattcttatgcaagattctctgactccttccagttctttccaggagacagggacagttgcctgtaatgggcatacacttctgactcaaccagaaaagaagcggcagatactgtgagtgattttctttttcaacaagcacccggagctaaaaatgtacagatactcttctttgggtgtgtaagaacaattcctggctgtcagtcaaaaaacaccaaaaagggacagcaagatgacgcagcatttcaaagtgctagccaccaagcttaatgacctgagttccatttctggaacccacatggtgacagggtttctccgtgtagctttggagcctatcctggaactctctctgtagaccagactggcctcgaactcgagagatcctactgcctctgcctcccgagtgctggaattaaaggcgtgcgccaccaacgcctggctattaactttctttcattattttactttattttattttttttgagacagggtttctctgtgtagctttggagcctatcctggcactcgctctggagaccagactggcctcaaactcacagagatctgcctgcctctgcctcccgaatgctagaattaaaggcgtgcgccaccaacgcccggcttagcttgctttcttataccttctatctccacttacccatggatggcactgtacttagtgtgctggaccctcccacgtgaatcgttaatcaggaaaatgcccccataacttgcctcctacaggccactctatggagttaattcccccaattaaggttccctcttcccagataccactggcttgtgtcaagttgacaaaaaaagaagccagcacagctgagattcccaactgtgtgctgtgaccctaagacatcgcagcatttggccatcgccatgaatggaccaaaccacttttcacttcttgggcaaggctcgctggtctgaagcccaggcttttaccatcgactcacaatcaatccctcagtgagtagtgggagatggttccactggcagaagaggaagcttttctagacatttcattactctcagaagtccagcagagggtacggaacaaatcggcctgtcccactgtgagccttgggaagtcattagcaagtgtctgcgtaaagctgtgtgtgaaaggacgaaggtcatgccatattctccttccacagagattcccattcggtgaggggtaccgttgggagtttcttaccaagtagctctatagtggatagctcacaccacaagaaacatgttcccacagctctggaagtgagcacccccccaaccccaggaagagtggacttttctctgctggaggctccatggagccatctccctgcatagagccctcgggccttgtcattcattggctcatggcgccatctctcccatctcttccttcccttatctcctggcctttcccctgtacccatccctaagactgcctctccctttgtctcgatccaacaccaattcctggctacggactggaatccagttctgaggcagcctaaaaggacaaaggaaaccctggggatgtgaccacctgcagtgaagcccctcggtctggaacccagctgaagccttggttagcagcccatcaagaacttcagcacaattaacaaccttttcttttggggcttttctcccttgccagaccaacctgcggatcttctaggaatctcgcttggagctccatttacaggggacaggacatgtgccacgtttcttgtgcaaccctggtggctcctggtttttgtcttatcactttgattgcacccaaggcatgtgtgcagccacatcatatctctctcttatcaacagacagagaagcaggggaaagggtgttttctccctcttggaggagcctgaaaccgcacttggctatatctcgttttttccctgctctcccttggggatgtcttcctttcttctcggcaccctttttttctccctgtctctctgtcttgctcttgttttgtgtttctttgagacaagtttctctgtgtagctttggagcctatcctggaactcactctggagaccaggctggcctcaaactcacagagatccacctgcctctgcctcccgagtgctgggattaaaggcgtacaccaccacacccagcacctctttttctcttaaccctcattcctaaacctatacaaaatgttttaatatcataaatgatactggttcactaaactagtcctaaaattcttttcagtgttgaagccgcctaagtttggactgagtcaagatatctaaaactacatggtaaccccctaggctagtagatgtggcagtgtggagctctgttcctaccgtatcccctacattttctgacagtctgagctcacctaaagtaattattccacaaagatctcccctgtccaaataatggcacattctggggctagctcagaaagcaaagtgggaaaggtcctgtcaaaccagaacaatcttccgttgtgttttcacggcaagaaaaatctttggccatccgtctcctcttctcagaagggaatattaatggctaaatgtggtgatgcttattttaatcccagcactcaagaggctgagtgaggcaggaggatagtagcttgttggaagttaccctgtgttgggcagtggtggcacacgcctttaatcccagcactcgggaggcagaggcaggtggatctctgagatggaggtcagcctgttctacagagtgagttccgggacagccagggctacacagagaaaccctgtttcaaaaaacaaacaacaacaaaggtggttagtctgaaatacagagtaaaagagaggaagagagaagaaaagagtgtgggagggagagaagctttctgttcctgggatttgggtgtcatggtgggagcttcaccccagcccctggcatccacacacccgaagagtctggaatgttatggtggaagttccacccctcccttatttttctccaaaccctgctgcatctcagaaaatccaccaaatgatgacttggggaggccaagaaatgctgaagaccactcccacggggtatttcaactgccccccagcaaccagacaagtggctttccagtctctcttttcaagcttttctctggggtgctggaaggccatccaggagcattgcattcattaaacatgtactttttctaattccgtttgatttagtttaatttggattgcttcagcagcagcaaggcttttcggggtacagaggattttcatctggagaaatgtttcattgggtactctgaattaggtcctttaaaacaaaacaacaacaatgacaaaaaactaatagacaagctggagagatggctcagcgattaacagcacttactggctgctattccagaggacccaggttcaaaccccagcccccactgggcagctcacaactgtctgtaactccagttccagacccgacaccctcacacagacatgcatctaggcaaaacaccaaaacacatgaaataaaaataaataaatccttaaaatacaaaaggaaacaaaacttggagatgacaaacattctccaaatggagggccagaagctgtcaggaatggtgacatccaggtccttaagctctccaggggggaaaggacagagaggaggaaagagcttgctgcaaacagttgatggcatctgacatcttttatcacttggcttttgatgtcaggcaaatactgcaaagcttaaaactaggtaatgagaattaagacctgatgacattaacatcctttttatttaataacaaagaataagcatggcagcttcgggacttgctaatgattgcttaaacatttcattgcaatatgcaaagcactaacctgtaatccacaccctgcagtctactggaacctaattccaaacctaggtccaggcctctggtcacaggacaggcagctgccaccagtggagtcctcacccacctggcaggtggatgctcctccatagcaaaatctacattagctacacaatagagtggaagggtctggtctaaagtaaaaaggatgttattaaaaagttacggtggggactggagagatgtctcagagtttaagagcgccgactgctcttccaggggtcctgagttcaattcccagcaaccacatggtggctcacaaccatcccttatgagagctggtgccctcttctggtgtgcagatagacatggaagcagaatgttgtatacataataaataatctttttttaaaaaaaaagttactgtcttcagaagagggtgtgggaccattaaaaatgcatcactcactggcatgtaggaaactgatattcctacacaaagatccagtgaaattctcccagggcagctgtgggacttcacgctgggatctcaaaatactcacggtgcttatttctaagtttccttcttttctgggagtgaagaacgccagaccctcagggtttactatgctggcttttctaggaactcgctgtgtgactttggaccatggactaacttctctccctgtaccagcatccaggcctgcttgaactcaaatgagttaatgtttgcaaaaggattgcagcctagctgaagaaatgctatcctatgctagacagaataattatttttatgctacaataagaaaatattgcaaaggtcaggggggaaaaaaggcagccaaagacagaggagatcatagacaccaacctaaggagactttaatgatgtcctgtgatggctcagagtggccttcccatcccccagacaagtctaactatgttaccgggtggtaaagggcaggcgacccaagcctctgggacactcacaacaaaagagatgctggataggaggtgacatctccaatgattttggcttcaggtcttagagtttctagtccatttctcctggcctcaccaggtccccctacatctcttgcctcccccctcccccaacgacacatgcataaaaaatgggatggcacagcctggaggattgttcactgggagcccagctctcgtcaaagagacaagcaaagcctggaaggaaaggcaggcaggcaggaaatgctagctcagcagaagcagcccctcccagaagagcatccccagcgccaggaggaggcaggcagccacgcttcccactcattgttattccagccaggtgtctgcaggcaggcaaccccagggtactgcagaggaatgtgagcctcgcaccagatccaccagatcggaagcaatgcccccaccgacacccagcagcaccccttcctggggtccgagaaaatgaggggtggggggtgtctccaagcaagagtttctgatgggtcaggcttgcacataaaagatcttgccaggctcctctgtctggggcccttcctcctacttactaagcaagcaagagtgcccctccccttcttcctcccagacaacctgaccttggctaaggccaaatacaagcctgggcagcatctggccattcctagcattctggcgagcaagcctgagaagactgagaaggatatgtgaggctgctgaggagcacggtccaggccctggtacaggtggcaggcgagcttggctttacaggggtgtttaacatcatcctaggtggggaacccaatcctcacactcagtcagtgttcctgaaaatgccataaagccttcccctaacgaagcccaaggcttcaataacagtaagtgatgccaacccactgggcagtttgagtgagctagaggcaggcaaggtacttctctttgtatccacaccccggaaaagcagccacgcacgccccagatctttcagatttgcccagcccactactgtctctgcgacgtgaggtcttcttccattctcctgctcgcaggctcccaccagaccctgaaggggggttggggggaaggggctgcatggggtcacagacaggatgccccaggacctgccgtgcaaataccaggacagtaaaggccgcgcgcttgatagatacagggctggggtcacctgcatccatgccttcaaccccatactgccttattacaacctttaagtccacggccagaaagggtggtgctggggtggcagccacattctccacacaggaagctgaggaagatgaagccacagctgggacatccaggaaggaggaggcaaccttggaccaccatgagccaaaggtgctcctccatgggagccaaaacacacctgtgaaacattgactagatgctcaaagaaacatcaggcgcacacagagcagggattcagacagcatggcggggtgggaagggactgacacttctggcaacgttaggtgaggtcatccaagccaggtgagggccgggcgggctatcacagcagaggtaatgcgcacacgtggccttttagtttacctatccacaacacctggttattcagccatcctgccaggcattcaaactggcctcaggggcctcactgagcatgctcaaatacaggagcacccagcacggccacacccaaagaacctttttgcctggtgcttcagctcccacgcccagtgggctaatgcaaggtgaccgccagatgctttgactattatatccacacagagctattagcacacagtttgggaaatggaaaatccaagatgcgtgtccccaaccttccaaagggagcctcgtggtgagagctgtttctggaggctgtgtgggccgtttctgttcctgtttccctgtcgtttgtaacttctggaggctgctcaatatcccctcatctcctaagcaagccaagtttctccgttgcactattcgggcccgtttctgcctttgtttgcttttttaatgcagtctgggtagccctggctggccttgaactcagtgcgtagccgaggagcagcttgaattcctgcttctcctgtctccgcagcattaagtgctgtgattccaggaatgcaccacccatgcctagtctgtgtagtgctggtgactgaacatagggtcatctggacactaagcagctactcaaccaacagtgaagtgctagtctaacctgcatgagattctaggatcggtcccctgtactgaaaaaaagaaaatgtccttaggaacattgacaatacactaacagagaagggaggaagagaggaaagctgagattcattcagcatgggtccgttctgtagtgaagccaggaacgcaggtgacatccaggagatactggcatgggctccagagaagcatgcatcactgaggcttggtcacaactcagaggacagagctcaccagttccatctgagaagcaggaaggaagccaaggctctccaagggatggggtgcatgcccaaacccctagagcaggggcttgagagtgaccatggttccagcgggctggctttcttccctgcaccaagcctccttgtgtctcctacacagactcgaatgttctaatcctcccggagtcacctgccagcccaccccccctccgcagcctaaagccatgctttcctgccccctctctctagaccatcaggacagagccctgcagtggtgcaagcagagttctcggtactttggtttcatgactcagcgtatggtaacagaagcgcctttccagggcatacctagagaagccacatggtacacaggggacaaacatgaccaaatggacgctgaagccagctgtcactatgctgtcacctggaagcttgccccaaccttcctctagatctctctacaccctcattaacccagaacggacaaagattacagaccacagaagcaagcccctgtcgcctgaacaacctttactccattcacctgagacaccaggggaaagtcctgaggccaggtgcaaaccggctagagagctggagattaaatgtgggcccaaacacctgtgccaggtatggggccagctacctccaagctgcatggcttcaggcaggccacttcccattctaaaggtcacctcccaaacagactctgtgcgagcagctgggcttacccaggaagcagatgtctcctttctagaagcctccagcaggggctggacagtagtacaaacactggcacactcaaccagataaagtgcaagtggtgttatgagggagtctgaacccccctcccctccccagaagctagagtagagcttggcagtggagttccccggaagttgtttgttgttgttgctgttgttttaagggagcaggattttgttcgtctgaagacaatgaggaagaaaaggccacttatctgagaatatttaaagttgacagctccagggtgggtaagaggatggtgggtaggggcgccggcgacagaaggagttggtggaggagcaggtcctcattcatttgcaaagcacggtctttggtcccacagtcagatgcagaattgcaaagacccgtctcccatagagatggaggcatgggttcctggaacagcaagcatgcctaacaaagagaactccccagttcctaagaacagcaacagttaatcagaggggtctcttgagccagtaagggcgaaggaaaagaggggttcgcaaaacacgcacaggtgataaacagggaggggtacagccacagtcgccacgagctaagagggctgcccttcagcccctaagtcagtggtcggattgatgttcagggaatctgcctaacaaattaagcttttttctgcaggtgtgtctcctcctcacttagaaagccgaaccacacccacccaccaccacagccataacaaagagtggccggtgtagaaacatctccacaggaatcaggcagaaggaagaacgtctcttaaatgtcctgatagttggggagcagcatctctgtctctgtcaagaaaacagttgtgcaccatgagcacgtgcttgtgagtgtgtgtgtgtgtgtgtgtgtccagtaagaggcagaaaggagtctccctgcccagaggcattaattggctgatgacagcagctgggactgactgccacagccagcagcagcagtaaccacccagtacctgctcccggactggtcccaggagccaggaggatgctccctgctcatctcacagcagctcccagtggggagccgttgttttcctcctgatttctagaagaaatgacgtctggagcaccatatctgtgtaggtgcacagagaacacggtagacagaagctcgggtccctaaatcctgtgaccggcatgatacaatgacaaagtatcccagtgtggtatcagcgactggcaagagaatatgaggccatctagaagcaagatggcaggacgtcaaaggtgagaggaatgggacagcaggacagccagggattggtacttgctcattcatttctttggttctacaaatccactcaaaagtaaagtgtatttgcctcttacagaatcctcagttgtgaggtctgtgacggtggtcctgaaaaacacagggcaagagtgtgaggtacttcacacagctgggctcagggttgggggaatagcagctgtgatccgccgcattatgacaagactgctggacagaggcacgggtccaacagaaactcattttggggagaagccagcagtgaactaagaaagaacgtggaccactacgttgaccagctgacaatttaacaaggatcttttgagaggcctgtagcctggcccatcaatactcatggaattacgcctcctggcccttgcccacacagtcacacagaaacaattcatcatgtaagatttattcaagcagctgtccaagggattgttctaggtcccccacactgaacactcacactcatgcatccttttaatacaatgatgttctatgaaggctaggccttaatcttgcatctgcagcccctatgtgtaaagacggcatggttcttattcaatgccaagagtgtagagtcagacaatgaccctgtcagtggctactggaagtggttttgtgtaagaatatttgggtggataggtagctggatggaacagtggctaggtaagacggtatttaagtagagggttatttagaggcttagaaaaccacattccaaaaacataatgcctgaatcctttcaactataggagttgagaaagccttagacgcaatatctcacagaccttttcttgccccactgactctgtctcattctcccacagtttgggtcatagaaactcacgcgattcctgttcctcaaggcaggtgtcagagcctagaacccctgttcctaaaagcaagtcagaaaagtaggcatgacactctaacttcatgcctctactgtcttgtaaatgactgtgaactctcttactcaccctcatttcaggggtgtccagctcacacctagaaggaagcaacattggctcattgtgagtggcaacatttgaaaggattaagacctgtggccttgtttgagggagcgcatcactggggggtggtagtctttaaggtttcagaagctcgagccaggcccagcggcttgctcttcctgctgcctgcagagctgtagagctctgagcaaatttcacagcaccagggctgcctgccttgtgccctgctgtgatgataacagcctaaacttctgaaccataagccagccccaattaaatgtttttcctttatgagagttgcacggtcatggtgtctcttcacagcaatggaaaccctgactaagacagatgcagaacagccaaagggatctcagcggacgggccgctgggtctcacccccttagtctgtggcagtaagatcagacacttttgtccaatcacattctctatggtactgtacacacaccacttcaaaccaaagtgtaaaagtagttttctctgaaccttgagcatctttggctgtttgtttctgaaggctccccagataacgtaaaagtttgacgagacacatctgctttgattgggaaagtagcttggtggtagaatgcttgcctcaaagatgtgaagtcctgggttcaatcccaatacaacaaccaccaaagagagagagagagagaaagagagagagagagagaaatgtagtgtttcgctcctgctagtgtatgctttcttatgaacaggtcagccatgatccttacagcgggtaaggaaaggcaccctgtgtctctgtccctagggctgggttagaagggctcttttttttttttttttcatctttttaaaaattttattttattagttcaaattaggaacaagcttgtttcagatgtcaatcccttctcccgctccctcccctgcccccccaacatcccacctgcccctagccatcccccctccactccccaggcagggtaaggccctcctcaaaaggggctccccaaagtctaccacatcatcctgggtcaggcctaggcccttccccatgtgtccaggtcaagagagcatcccttcacatgggatgggctctcaaaatccctagaagggctcttatattccaggatggctagatacaaggctgaatgggttgaaaggcggcagggtggaatagtagaattgttgcaagaaggccgggcgttggtggtgcacgcctttaatcccagcacttgggaggcagaggcaggtggatctctgtgagtttgagaccagcctggtcgacaagagctagttccaggacagcctccaaagccacagagaaaccctgtctacaaaaaccaaaaaaaaaaaaaaaaaaaaaaaaaaaaaaaaaaaaaaaaaagaattgctggaagaaaaagaacatggactctgtgaggacggaagcatggaaggacaggagaaacaagagtcagaaggaaaattatcaggaagagacgttatcttcccaaacaccctgacgaatacagatccagaaaaagataggcagggtggcaaactactgtgaaatcccagcttgcacccttgaccttgggcagcagcaacagcagatgcatgcttcaatggaatgaagactgagagaagttccggggccttcagatggtcacacggcaagggagaaatgccatctgccaaggtgactgggtgggcagcaacaaagacctccttgctgtggatctctttctctacaagaaaacccagcagtagttacttgctcggtctcttgaggaacttgcccagcttcaaggttcctaggaaccttctccaaaagtgcaccatcagaaactttgagccatcacttgcttttccgaagatttctttgtggagatggtggcccaggctggtctcaaactcctcaggcctcaagcctcccgaatgctggaattacatttgggcacaaccaagttggctttggctttggactggcagcggagcagcctatcttggttccatgcagcaccccagctcccacaactggcaactgagctctgccaagaaaagcccacgctggttccaaaagcaccacatcctccactaaacctgctctcctacacaggctcacccaggagtcagttccctggcagttccagaaaagggccctgcccagattcacacaccccctctccctgcattccctggagcatccctggttcccggcaccactggcagctgtgagccagtcctacggctcaaggtcaaagttggtgttcacagggtttgatgtcacccatctcttggcagaacagtgtttctcctgaggctcaccacacccagataatgcaagctcaaggagggcaagatgacacaggtaaggaaaggaggaaaggcaatctccttcaggacttgtgactcagcttgtctacttgtagggacaaagaggcaaaggattgcaagggcctttgggtaccaggcattaaaggcatgagaacctcactctctaatctttgacctagatgatacatcggcctcatttgacagataagaaaattgatgttacagcaggttaactggacagccaacccaagattcaagcccagctagctgacagtaagcccagatcccacttttgctctgatttttccattcggcattgccctgttcctgctctaagcatgaagaaggagcatttagaccccagatggaccagtggggttgctggtgggacacgctgtacagagcgtgcaggagagcgggggtgtgtgtatctctctgggaaccgtacagctgctaggtacaactgcctcctggcttcctgatcactcaggggaagtggcacaaactagcaagagtatgagctagctcgaaagtataccagagttcccattctgccactgtcacctggtgaccgtgagcaagctatttcaactccatgcccttccccaaaccggagtcggagctgaaaccagcactcagaagatgttcttgctagaaagcaaggatggctcacttagttccacaaaccagccacaggataacagtgtggcatccttgcctcatctctggtctgtccatctcttctactgtggggcatcttgcttaacgagcacatctaaccggtctgatcctcattcaaggttaacggtatagacagaggtcattgtctgaaacctgcagttagcttggatcccaagaacagaaaaaccagatgagggcagttacccgtgatgccaaggctacacacagaaacagaagtgagcgtctttcctaagaaacagatggatcccctccagcactgacggcagtaaggccttcctgtggaccacctcgaagaactggagcgaaaaaatgatcaaacacaccatctttgaccaggattgcttaatattatcttcctttagccgccttgctccaatatttcctctattcaaacctgaagcatgtgccagcatcccagaagacagtctccggggtcaccagagccatttatttgtttgtccttccagcgtgactacactaacaaatgttctctttctctctgcttttgtactgttacttatcactttaaacagcagactgggggccgatggccaaacatagtctactggggctgcctctgaatttaagtatatgcaaaggtctgtgcttttgccctgaaaactccagttgccactacgcctggagtgacgtggaaaagacagaggacattggtgtccagtcttcacctgtccaacaaggaaagtgccccattcatagctgtttttgtgtcttctaaggacacagtggtgtcatcaaggcattgaatggccaatggacagtgggattaaatgggataatatgacaccagtacacaagaattcttgcacctgttcctccccccctcccccgcgtgcgcacacaacacacacacacacacacacacacacacacacacacacacacacacacacacacacacacacacacacacacacaacaggactgaattctcaaggtaggttctggatgctcccaaaatacgcaagatccaggaaagttagcttatcatcctgggacccacccaggacccaggaatctgcccctcttcactcctgccccaacttgcttaatcactgccctggctctatgcctgtcagccagctgctggcttgatttgaactttggggttctgaatcctagctggcagccccaggcagaggtgtgaatcactccctagcccaccggcctaggcctggatagggattagtgcagaagagtcattgaaggtggcagagagggtcaaatttttaccaatctagactcccttttaaatgtcccaagagtcagaaaagcccaaccgaggtccacaaagggctctctgttgagtatccaggcaggctgtgtgtgactcaggcaatgactcagcagcccactagaagagcatgtaagcaggctcttcagttgcttctagaaccactcacagggtgtgtgtgtggggtgggcggggggtccagtgccaagctccgggcacaactcagtcccaaggaatgtcctccactgcctaacttgcccactgcctgcgattcatacacctggcatcccgtcggggccacgtgatgggcctgtcgctgggccagggcaaataggcaggggcaaggagagccccacttcccggctaggatgaggtcactgtggagtgcgaagaaggaagcaggatccaggaccagggaaggggtggggatggccaggaagtcagaagcccgcctgccgggctactacaagctggcttctggaactaaggacagaggagccagtcacagagtaggaaacaaaggagcaaaataggggggcacaatggaacccctcgcctccctccatctcccacttttcctcctctggtcattttcccccacaaatacatcctagcagaaagcttctgccacaaccaacctgagccaagacaacccctagaaatactgcagagccctccgcagcaagccctccagccaatctgctcctcccttccctatggggcctctgacgacggtcttggtgcatctctttcctacaggctaccaggaggagcctgagaaacttgccttctttcccagcatcccatagggcggcaaagtcaagagggcttgactgtgcagactggacactgtgctctatgagagaagggagagccaagccccttatgggatcgccaacaaagagcatccgggtcattcatttaagggtggcacagtggcaccttggatcccagcactcaggagggcagagacaggagaatccttgagttaaaggcttagcctggcctacacagcaagtttgaggacagcttgggactacatagagaggtccttgaaaataaaaaataatggaaacaaaatactcatttacacacagccggaatttgagaaacggtgttttgttttggtttggtttctcgaggcaggatttttctctgtatcattttggagcctgtcctggaattcattctatgtagaccaggctggcctcgaactcagagatccacctgcctctgcctcccaagtgctgggattaaaggcatgcgccaccaacgcctgacagggaatggagtgccttcttgacagtaaggaatggctagcagaaccagctcactttgctcagccttcttttggcactggggctttacctcccctaatcctagttatagtcttgctgaggggctacaaagggtaccatctgattgttgcctgttaactcattgacaccaccgtgatttcttacgttgtagaggaggaaaccaagcagaggaccagagaggttaattacgttcatgacaagattcaagccgagctaggtcattcattagttacttccatgtactaagctctgcacctcacttcctgtttgctccacgccttccaaaccagggagaagaccctctgcccagccttgagactccagcttctcaagttgtgataggtcgtagaagtaaatgtgagcatataaagtaaaggcgttttggatgtacgagagccatcccttacttcaaaacaaaagcaggaagaatccgacatgcttctggcagggctcgccacggtcggtcacatgaccttgctgcagcctgcgcacacctgcactttggcccacgggttctatctctccattcagcatcaatgaacatgcctgaaggaccgaccttagactcagggctactgtgtgttataaagtacagtacagggttttactcaccacacaaagttttccactctatagaaacacaatagctaaaatatgagaaaacagggacaatttttgtcttgggttgaaatgtatagttttgaaaactgctgtttgaggggcagtcttatttttttgtttgtttgtttgttttgttttaagaattcatttatttatttatttatttatttattatgtatacagtcttctgcctgcatgctagcagagggcaccagatctcattcagggtggttatgagccatcaggcggttgccgggaattgaactcaggacctcttgaagaacagtcagtgttcttaaccgctgagccatctctccagccccaaagacttatttatttttatgtgtcctggtgtttagtctgtgtgtatgtctgtgtgatggtatctgatcccctggaactggagttaagacagctatgagctgctgcatggttgctgggaattgaactcaggacctctggaagagcagccaggactcttaaccactgagctgtctctccagctcccttagttttttttttttttttttttaaaaaaaaaaatatatattttgatcatatttattcccccctcccaagtcctcctagatcacacctgtgtcctccccacaacacactttgaaggaattacaagtttaggctgagtataggatgggatttctagcaacttttacaataactttacaaatacttttaccaactaggtgctggtggtgctcacatttaatcctagcactcacagctgtaatccccggcaggtgaatctctgagttccaggccagaacagcccaggctatacagagaaaccctgtcttggggggtaaaaaaaaaaggcaaataaatatataaatacttttatcattttctgctgtgtatttatgtatagcagcattagtgattacgaactcaaaatattaaccacatctacaaaactaatcctaactgtctgcaaagatgaatccaggcacagacatacctgcgctcctgatgttgaagaggctgaggcaagcggacctcttgaaaccatgagttctaaacataggcatctcggagagattcccatcataaaaccccaacccaacacatgaaagtctccgcacagctgattctcagatctgtgcaattgctacgtactcaggtcaaaccacagagctctggaacacatataaatatcaactgtttatttatttatttatttatttatttatttatttatttatttgttgttggttttaccggacagggtttctctggtaaccttggctaccctgaaacccagggaccggcctgcctctgcctcacagtcctaggattaaaagcaagagctaccatgcccagcttaaatatttaattatttgttcatttgattgattgattgattgattgattgattgatttgtgtgggtgttttgcccagtgcctgtggaggccagaaaaggagttagattcccctcgagttacagaccgtctgtgagccaccaattgtttccatcattaaccatcattcttagggcccctgaaccaatgacagtggcaccataagcaaaagcccaaagacagacaagtcaagagcaaaggtttctgatattgtattaggaaaacgacggagatggagatggcaagggcttctgttacatgccaatagcatggcctgttttataagcctggcctttgcttgggtagtggcaaagtctacacatagactctagctctgaccaagcagcagtcctcacggcccttgctcaccgacccactcagggcaactgtgtctccctacacaagcacggtctcccttccttcttgcagtccctttcacctcaatggcagagccagtataatggcagctgacagggacctggaagcttctgagggatccagcctttatcttattacaaaccagtttttccacctcctgggaacagcttgttctgcaggcagctggctgcaagtcccattgcaccctcaacgacagcaagccccaagactgtgggaaagggggctgtccgtcctacactgctcacaaccgccccggcccactggagatcccgaaaaagatcctcagaggtttgagggaaaaaaccatggatgcacacgtttcatggcactgcccgacagtcactaacgcctgcactttcaaacaccctgttcttgtttttcgttccctcgccaccaaatagccactatgccctctactcagctctgatctcagctgccaccaacaagaaatgagactctctgccctcttcccagcttctcaccacacaccaggacaccctgggacctgtcctgtagcctacgcctgcacacgacagccctaggcgcagctttcatggggccagttgtgaggagtgctagcccagctttttcatttattttactatcagtgacttgtgtgtgtctatgtttttgtatgtgtgggcgggtacacacgtgccatggcgtgtgagtagagatcagagggcagccctgtggagctaattctttccttctgtctttatgtagactcaggtggaactcagatcaccacacgtgtgaagccagagcccgtgtgacagccacatcgatggcctaggccaaacattttgtaggtgtgctcctcgtggaattggtttaagctgtcccgataattcagcctcttggcgtgctgtgactagcagggtctttccacaaaccctatcccctcttgaagcatagcagtagacttgggttacaaagaccgtcacttgcatggacttcctcatggctgacaacaaatgtattcacgtttgcccgttcccctctccactcaggcaaatgacgatatgctttcgagttttgctttggtttcaacagcccatgcctggatctgcctgaggatgctcacggtgaaccctatttccttccagcatccagctagctggaccgtgtgtcatcatttactccatcgatctcccattcacaaaattgctcccaatctctggctgctataaaagtgtaactatgaatcaccgtgggcacagttccttttgtacagctttctacagctggggaaacagctcagtgtactggtgggaaattagaaagacaaggggtccatgcttttgtaatgtggacagaaaaaaaaaaaaaaaaaaaaaaaagaaaaccaaagcaccatgtcttaggagacatctgctcagccaggtgcatgcaccagagggcctctcctgtggcttgcaaaagagtgcattactgacttgtgcagagtgtagtctcaaagaaaacaaacaaacaaacaatgaccagtcatttcaatctgtgttactctaggcaaaagcatcttagggtttaaggacccctaggaacaaccccccgccccttttattaaacagtttctctattttgtagcctaggaacttgctttgaagaccaccaggtgatccttcaactcacagagcactgcctgcctctgccttccaagtgctgggattaaaggtgtgtgccaccacaccctacaggaccgttctctctctctctctctctctctctctctctctctctctctctctctctcaaattatttttttatttgaattagaaacaatcctattttacatatcaatcccagctccctctccctcccagcctccctcacccccacccacccctcatgaaatcatcacagtctgtcacatcatttggggcagggcctagccacccacccccacctcaatttgtgtgtctaggctgagagagtatccctctatggggaatggggacccttctcttaaactgtcttaaaactctgagagtctctgaaagccgctgtgtccctggcttgggccgatccctgcccacctagagccagcatggctagccatatccctgcctcatctcctaacaggccacactattttaagtctctcagattcgctactcacaagggacagcctgcaaatgttttccactcgaacaaaagatttaattggtagaactcaaaacacggcatcacaatggggtctgaatatcaagccttccagaatatcctctctggagacagacagctcctttgtctttcctgccagttacaggctagcaggcacaaatacggactcatctaggaagttggcctcaagtagtagccattttctccaaagtgagatctctggggcgggtcccagtcatatcccgtggggggagggggagggtggggagggcaacagagtctcagaggtcacccagggtcatccattccccggagggtgatccatgacatttaaataggttccccctccacattcagtccaaggtcacacgtagagtgagcctcttctaactcatgctggcccctcccaccatcctgtttcctcctctgtagcccaggaaccctcctcacagtggttcttaacctattttattgggtttgaacgacctgaccctttcacaggggtggcatatcagacaccctgcatatcagatatttatgttacgatcataacagtagcaaaattacgattattaagtagtaaggaaaatgactttatggttgagggtcaacacaacacgaggaactgtgttaaggggttgcagcactaggaaggttgagaatcactgcagctaggccgtcctcttcaaacgccatttgctgtctctgagaccaggaggaaccaggtagggcctacatctgggctctggtgtactgggaggcaccagcaggaggtcagagggcagagagggatttagggggcttcggtccacgtgacagtccttcagctccagttctagctacactgtctgctgtgctgtatctaccactaaaccttcacctatcactaagccctccttcattggtccctgaacaccatgaccatgccacagccctgtggctgatctgggtgcttccttgggctctctgccaatctcattatctgggtttgaatcccagttctgtcctttattaactgggccatctcaggccaagttactcagcctctctgggctgtctttttttttcatctgtagaacggaatgataatatttagaatagaacatggctagatggataaaatgactcggctgacagaaagcagaacccagcgtgtgatgcagggaaagcagaaagtagaagctacctttgtcactgtcacagggatagcaatatggctttgttccatgtgacatcagctgggccaattactgtacctctcaacagtccccagtgacaagccttcaaagggcagggggtcacagagcttccagccttctcccagacaagtgctttggtaacagcagccgtaattggcacaaaatttgtgaggtacttgtgtgcatgccttatgtctccacacataaacagtcatagcccttcagaaccgcagctcatattcgcaacccgatataaaacaaagccaagaaggctcctagaaggtaggtcagaaatgaaggctgggacacaaagaagagtcccagccacgcccttgacaagatcttcctctggccagatccagcctcccaccacaaggtcagtgcagaagagactagcaaaacacaaaacaaaacaaacaaacaaacaaacaaaaacgaaaggaagtcaggtgaaggtttataattctagcacttcgcagggtcagaaattccaagcggttcttggctaagtgagactaacctgggctacatgagaccttgtctggaaggaagcaaggaaggaaggaagggagggaaagagggagggagggagggagatcttccacctgacactcaagtcctcagtgaaagcttatgtttataatcatcctctctcattctctctctctctctctctctctctctctctctctctctctctctctctctccctctctcttatctttatctttctttcctttttggttttctgttttagacagggtctcacactgtagtccaggatagcctcaaactcatgacaatacttccgggattacaggtttgttccaccaggcctagattcccctttttctctttaaagaaaatagttgtttaataatataatatatattataatatgcaataatataattggtgtagggatctcaggaaattacagggattacaggatagttagccacaacctccccaaagtttcaaaaatcaacagaaaaacagcaatttctagagcttggcagaactcatgattagcacatgtgaggatgtagttttggttcccaacaagttcccaaaaataaagtccatttcagagaatatatgcttaaatgataaagtgtcagcagcgagatttactgtggctacttttcttccctttaaagattaaaacccattttagtaaaggattatagcctacacttgttttttggtttttggtttttggtttttggtttttttatattggcatcccctatgtaagggagtttattttgacttagcatctcaaccagggaaaatgggcgacgtattctttcccacgctacttcctgctgactttgggacaacgaagttagggacccaagaatatagcctgcacttgtaatgccaccactttggatgctgaggtaggaggaggattgccatgcctttggggccagcttggactctgtctcctaaagtaaaaagcaaaaccaaagaaaggagggaaggggggggggagggatcaggcaagcaagtgagtgagcatgactagctgaggttgtggaacacagggctgagctggaagacagccctaggctgctttatactcacctgcaggcccctacccagaaccccaggcattccctgtgcaggcaccaggtgataatagcagctgcagggaagccgggttgtctgccaggtgtgaaagggaaccacaagattccaaagagccctggcacttgccctgcaagccagctccctcagcaggcctcacttggggcagagagaggctatgttcactactgtggcatcctttcacgcccctctccttcagccggggctccttacaatcttgtgatatgggattgaaatcaaaagccttggagggacaggaaaatgatgggaggttggtgaatgggcccattagatgggggtgatgaggagataaaaactcctctaggaataaaaaaagaaaatgggactagccttgggttcaaccccaagcaccagaaaaggaggagggaaagaggggagaaggagacggagagggaagaagaggaagaagacaaggaagaggaggaggaaaacttagccctctacagagccaggggaagagcgtccttggaagagggacattaagtgtgaaggtcctggagtacacacaaaagggtaagtgggctatcctgggctacatagaaaagggtaggtgggctctcctggaatacatgggaaaggccaggtgggctatcctggaatacatggaaaagccaggtgggctatcctggaatacatagagaagggcaggtgggctatcctggaatacatggaaaagggcaggtgggctatcctggaatacatggaaaagccaggtgggctatcctggaatacatggaaaagggcaggtgggctatcctggaatacatggaaaaggatagggggctatcctggaatacatagaaaaggccaggtgactatcctggaatacatagaaaagggtaagtgggctatcctggaatacatggaaaagggcaggtgggctatcctggaatacatagaaaaggccaggtgactatcctggaatacatgaaaaagggtaagtgggctatcctggaatacatggaaaagggcaggtgggctatcctggaatacatggaaaagggcaggtgggccatcctggaatacatggaaaagggcaggtgggctaccctggaatacatagagaagggcaagtgggctatcctggaatacatggaaaagggcaggtgggctatcctggaatacatggaaaagggcaggtgggctaccctggaatacatggaaaagggcaggtgggctaccctggaatacatggaaaagggcaggtgggctatcctggaatacatggaaaagggcaggagagctaaccaagtcgaaagtgctgagtaaaagaaaagggacgaggagatgacactggagaccagcagggccagtcagctcagggtttcaagagtggagagctgcaacaccacttccagagaggatttaggttttacggtttcaggctttttcttgtagcgctaagggggaaactcatgccctgagaacaggcaagggcctaccactgtactcctaggacagagacggtttgaagagaccggaagggggtggttagcaatttgagtggcagtttgtgagggggccgtaagggaaggagcccacgcaggcggttgtgcctgggaagcgagattcaagcagagtggagggggggcgctatttggggggagaatatttcagggaatattctagagactctcaaagtgaaataagggattcttagttccatggcgactggcaaacatgttggagagcagtccccccaccccaaggatgagcctccaggtcacagctatgcatttgagaatcgttggcctgcatgattaatgcccaacaaatgtccccgagagacgggcttcacatccacccagggccaagcccagccaaaatggagagggctgcaagacagcttcgaggaaagagtatgaccaactccacttccggcactggggcctgaccccgccagggtaacgatgagaagggcaatgctgagcttgcaagatctaagcctggggcacaggctcaccagtagagcacttccttgtcttttgtgttcaaggctttggatttgagctctagcaagaaggatcaagacgagcgaaggaggaagaaaaggggaaactgacatcacttcattgctgggctggggtggacagcagctggcttgtccccgtagcctgtcacattccataagagaaaagcaggcagttcctgaaagtccccagggcagggccgagggaggtagaaaagacggtggaatatggtggcgtgcttggcttgttgagcaaaactgaagtgtgcaatctcagaccatcagcctttactgtgctgtctcatccatgccctggggcgggtgcagcagggccatgggatgatgattgacagcaggatttcatgtgcaaaggccacttagcagcctgctggtcaggcctgtgcctacagactctagaggcttcgactgcttcctgcataaggaacagccatcaccctaacccagaaagaccgggagctgggcccacgcagacagaaagaatgcaggagacagtgaaggtgacattgcatctccttactgtgttgtttgcagttcttgttggattgtttgtttgtttgtttgttttcccctgggacagagtttctctccatagccctggctgtcctggacctggctctatagaacaagctggccttgaactcgaagagatgcacccgcctcttcctcctgagtgccgagattaaaggtgcacactaccaacacctggcaccgtgctctgtttggtcccccaaacactctcccctaactccatgaataccaaaccactttagacttagtctagctagtgtatgaactgtgttcacctcactcaagtgtaagtcaagtcaaggttgcctgcagtgacagagccctccctcagtgtttccagagactgtgcatccacttggtcattccagccatcccttgctgagccccgatcatgttccaggaacccaccaggcactgaagctagaatgcagccagctggtgatctcatttatgtcaactggcttgtgggtcacctaaaatgcaatcctggggctgggtccagagttgaagggaaagggaggcgcatcctacccctgtcctgggaacacaga

SEQ ID NO: 29 - DNA, 30376 bp, Cricetulus griseus
  >scaffold_21 dna:scaffold scaffold:CHOK1GS_HDv1:scaffold_21:9452150:9482525:1
  misc_feature 12623..12722: /note="n is unknown"
aaacaaaaacaaacagatcaatgaaggagaatacagaacccagaaacagacctatagttatagcctcttaattagtgacaagtatcagaggggaaaacatcctcttctacaaatgttctgacaaaactcagtatgaacaatgcctaagaatgaaacaagaaccctctcatatacaaaaatcaagacagtgaaactgccacaacaaaaagtatgaggacacttctgagcatgcagcccaagcagccatgagtcatccttaaaggagagagtcatccttacacagtgtacagaactgtgacaaatgcacttccatctgaaatagactcagttacattcatcaatgagggactgtcactgggaaggagggagaaggcacaggaggctaaaagcccagcaaagctaagcagtatgagaatgcagaccatgttgctaagtgtgtagcacttttctgaaactagattatggccagaaaagatgaagattccctttctgatactgtaataggccaaaagcctaatcatgttctgtggtacatgtgatggttattcttggttgtcaccttgattacatctggaattaactaaaaccccaaatggagcacaactgtgagggatttttgcttggtttaagtgggaagatctacttctaatcctgatcttaaggaagatgtgcctttaatccagatcttttgagctgggaaatcctacttgtaatctgggccacaccttctgctggaagcctatctaaggacatggaagaagggagtttttgcttgtttgctttcacctcattagcaagtccattcctttattggcattagaaccaacttcttcaggattccactacatcctttccttccacaataaaacttctttcccatataagttctgcctgatggtgtatctgtccctcatcttccatgggacccttccaaggtcctcctccaaccatactcataacattgtgaacactccaaaatgagactatcaattacaatcacaatgaaaataaaataaaggatccaaaaaggaaggattgggtaatttcctatagcttaaatgtgttcccagaaaacatgctaaaagcttaatcaccaatgcaagtgtttagtggcaaggcccagtggcaggtgtttaaatcatgaagtcttccttttcataaatggatgagggacaattacaaaacagcctgaagccaccaacctaccatttcacgctctctcagtcactatcacagaataggaatgcaacaacacccttaccagatgctgggactgaacactgcaattcccaatctttgaatcctaatagtttttaacaagctacacaatatgcgccatgatactaacaacacaaaacagacaccttaagtatctgctacctaacaacacaaaacagacaccttaagtatctgctaccttagtaactaccagtcaagagtatttaaccatgtgtgcaggtgagtagttaaacaaaaacagaattcagaaaattcaataaactcagaatgccaatgttcttagagatgtgaccatattgatgaaggaacttcgcttccagactttaaccatgattttcagaaagctgtttcaagaatcacaaaaacttctgcatgattatctgtttaccatttgattgcaattttgaacaaaactactatcctacctcaaaagtaatgtgttcactatcttccccatccttttacttgctttggttctactacaccaaaacatctgtcaaaagatgctacctatgatcctaacacgtcactccaaaattcacatggaaatgtaagctccaatacacagtattgaggttgggtctgtaagatctgattaattcacaaagggtcctccctgtaggtgggattacgacctctgttaaagactcttcacacagctgtttgtccttcagccacactgagcaagggtcactccctgaagcaacaagaccaggttctcagcagctcctgcatctactggcacttggagcaatattaatctattgcctacaaattatccagctttaggcattttgttacatcccaaacagtctaaggaagaaaagcatctgaatttacaatgattcatcagtgttcttaatttttccttcaaaccaaagactcaagaaattaaaaccaagtataatctgtcactaaaacttgataaatgtctgtcatggaaaaaaatgtttattttgaaattattttaatttagaatagaaaacctcttagggaggaggaaagaaaaaagaaaccacaaagtatacaggcaacttttttacttcatgagcttctcacaccctcatttgttcactagttcccacgaagataaagcactcagccacccctgaaaaagaaagaaaaatggtcactcttaagcagagagtataacaacaatcatttgaaatgtaacatgctgtgattttatgaaatcaaacccagtttcaagagaatagcacctcactttatttcaagacagtataaaagaataatactaagtgaacatctgaagctgaaaggccttaacgatgggtggctttggggcagatgaattttacattattatgctcctgtgggaaatgtcattttagaacagtctgacatgtctttctaaactaacagaacccattaattacacaagaaatttttcaattttatgtgacatacaagttagaaaccagtttcaaaaaatgtatactacagttcagcaccactgttttcaaccactggactctatcagaaagattcaagaataaacaaaactaacattctaaatttaaaagaatatcattaatatttattttagtagtgtaacaccaactagaaaaataattccattagtagataaaaattatatacccatgtatacattttactgctaacttactaacgtgttttattctaactcctttaaattacagtatggcatacattaattttgactataattgtaaaacaaggcaaatataaaaaccaccccccccccaaaaatctatcatgagggaaaaaaaatgggattacaatccaatctagtgagttttcagttctatttctcttggcatcctcactgaagaatttccatcatttcaagcacctaaacaatttctttcaattctatagctatagcagtgtaacacgggaagtgtgttttctgtggcgccttccccacttccacccaaaaaacaaaacaaaacaaaaaatattttatttggctttcattttgggaggaaaataataagtggtcaataacttgtaaaacaacaaaataaattttaattacaaaaaactttccaagtagcaaattttttaattgcaaaaaaagcatcaagtagatagcaaaaatcgtttcctatgttgctctagcacttatgagccactcaagttactcactgtcttcatgcctcagtttcttcctaaggattaaatgagttgattcacatttgacaaaaacagaaaccaggacaagatctcagcataggcaattgtgcccatgtttactagaaaaggataaagacttcaagtcatttacttaattagactaatatttattcattgtccttttttatttatgttttgtttgtttgtttttggtttttcgagacagggtttctctgtggctttgaagggtgtcctggaactagctcttgtagaccaggctggtctcgaactcacagagatctgcccgcctctgcctcccaagtgctgggattaaaggcatgcactaccacctcccgactattctacttatataccaatccatcttcatgtgtgtacatgtatgatgcgtatttactctcagtaagactggcaccattataaaagtctcctctcacggcctctaatgctattgtccttctgccccaataaccaaatgataactcagcatgcaaggatcaaggtcaggccctaaccagataccgaacccactacagcattataaatttgcatttcagtaagaaataaatttctactagctccaatttacccagtcttgggcattttgttaaagcagcccaaaagactacaacagaagagcgtctggtatacaatgttcactagttctttttcatataaaccagaatgtcagtgtcaaaaagaaaaacaaactcattattttgtatattagatttgattgtttttagtgaaaaatgtttacttcgaaataagtacagtttagaaataaaacattttaggaaagtgatgacaggaagaggaaaaaaaaagtatacaggcagataagtgacagacctgcctccaaattcacaatcttaatttgacagacgcacatatcaaagtatgacccaagttcactgaagtctgtcaagaaagataaaagcattctgccaagaaagtgaatgtttggggaaaaaaattagccccctgactcctaaaaagtcaacaatacttcatttgttgttctggaggtcaaagttaggggcatcatcacaaaaaaaaaaaaaaaaaaaaaaaaaaaaaaaaaaaaaaaaaaaaaaaaaaaaaaaaaaaaaaaaaaaaaaaaaaaaaaaaaaaaaaaaaaacaaaaacaaaaaaaaaaaaacaaaaaagctttgtgtcattaaagaactttcacaccaatgaacatcccagccatgatgtgatgtgaggcaagaggagcacactcactcacttgagaagctaatgcacttcttccccattgagaagacacctgtggcccacagtcagactcgggtttctacctcagaaatctctccaagattccacaactccaaagttggcatttctcattagtaatacaaatggggtttcttaatggagagaagagagccaatgacttagttccttccagctttctttttcgttctattttgttttgatatatggtttcactctatagcacaggctggcctggaacttagagcaatcttcctgcccctaacattccactccaaagttggaggattttaggcatataccaagcatgtccatcttaaccctagataaaattttttattatcccaaagtatccctatgtgttacttctgtttaaacctatctaacagtatgaatttacttacatgccagctggcagctgaacatatgcagcaaaaaggaactgctgctgtatctttaaaagcagtcctcagcagtgtggaggcaggcatgccactgtacttgaatgaaagcaagaagaggtgggaggggatgcacttgctctgtgtgtgtgtgtgtgtgtgtgtgtgtgtgtgtgtgtgtgtgtgtgtgtgtgtgtgtgtgtgtaaaaagcaactctaccaatattatcaggaaaatacctagtattgaagggattataaaattaaggagtttcctagatttgaactttaccaccccaaattggagaggaagttgaaactaatgtcataattgactacaaaattacagactacagaagaacctggagacctggctgtctcagtcattaaaggcatacattttcttgtagaagactagggctcagttcccagcaaccactctaggcaactcacaattgcttgtaacttcagcttctggggattcaacgcccttttctggcccccgaagagcactgcagtcacatgtacacaccccaacacatgtacacaattaacaaactacatgtgctgaactacatgggcatgtgttgagacgcacacccagtccttcaactaaactcaacttgtaaataaatatgggtttctctaactgttctattttaggaggaaaagcatatggcaaaaaaatagtgggatattttctctcagccttctctcctttgttacatacccaaaggttataaacaccccgccaaaaacagcagtggttcaataacaaattatccactgggtatttttcttaaggtcttacctgatttctgaagtcattaacctgtaatataatgcaagtaagaatttctgtcctcacagagaatggttagttaaaccgcccaagattatgacacatactaagcaacaagaaaaaagatgtaggcaacctggttctgtcagatttctaccaaaaatagtaattttttcagatgaagcatcattttctgcaccttaaaagaatgaagacaaacagggcttgttatgaatgtagtctgtcactgaatacttggcagtgatatagtgtgcctttgattttgttagatataaaagtgttttgaaagttgaaagtattattagatacacaatatcagtacattattaaaataccctgggtcatatctgtacattaataaaatgagctaatctgcaactcaaatggtttcagttgcagttattgctagatggactattttataaagttacttacacaataatgttattaatagggatatggatgagtttcacaaagaagccaatgaatcccatgatagcaaatcctatggctgtggccatggcaatcttctggaattctgaatacaaaacacaaaatctgcattaactttttggcagacactgaaagtatgaagaaaatctatcagtaatatcaataatgttaccagcattcactttgattggttgatacataattttaaaaatgaagaaaaagatagagtaataatagtacaatgcttgacttacaggtttctaaattccatactttgttaatatttaaaacacagaaatgaaaatactatgctcacaaattcatcagcaaacaccagaagtatttattattctcagtgaccaaaataaaaagcaagaacaaaggcttaaagccagcatacatagtgctttgtactataacattttttttcctgtaacatattgattataacagtaaaatcgtagctttgggtacattatcaagaactacttgtctttaataccatgaagtaaaaggtaaggattgaaaattcatggtcagcagttttataaaaaggttacaactctggtatattctatctcctaaggacacattctgtgactgcctcacctagttctcctattatgtgctaccagatctcattagcttccttctgactcatcaaggcaagaatcaaaatgtgcaactgcaattattggatggccttccctgacagacccacagcttcatgagaataaagactagtatctattatttgatttcggtatctgatctgtgttagctagttttaagccagcttgacacaacctagtcatctgagagaagggaactccaattgagaaaaatccctctataagatccagctatagacagacaatcctgttgtgcatttttggtttgtttttgtttttcaaaacagggtttctctgtggctttggagagctcttgtagaccacgctggtctcaaactcacagagattcgcctgcctctgcctcccaagtgctaggattaaaggtgtgcgacaacacgacctggctgcctgttgtgcaattttaattagtgattggttggggaggacccagcccactgtaggtgtggacacccctaggctggtggtcctaggttctacaagaaagtaggctgaacaagccatgaggaagaagccagtaagcagcacctgtccacactcaatggatcagctctcacctctaggttcctgccctgctcctcacttggcttccttcaacggactgtgattcaagataggaaaaaccaaataaatgctttcctccccaaactgcttttggtcatagtgtttcatcacatcaatactaaccctaagataatatgttactccattaagtctgccttaaattctaacctagtcaattcatgaatttaagtagaaaaaatctagcatatcttctaagctatgagataagaaagcaaaataaactttctgggttgtaataactgtaccattaatttcacattaaaagttttattcactggagggcagagcagggaagatgacaaagattccaaacactggtaatatgggagatactaaatttagtatggatgaagaacccttaataatctcttaccataaagcaaaaacataagcagttcttgctaaggacataaagaaaagggcaatggtggtgacattaatgcatggtccttttagtgtgttcttagcagcactttatcactgagttggttcccagccctgcaaagagtaatcagaagatgtgagccaggtgatggtggcacacatctttagtcccagcacttgggaggcagaggcacacagtcagcctggtctgcagagcaagttctaagacaggctccaaagctacagagaaaccctgtctcaaaaaacaaaacaacaacaaaaagatgttaacacaaaacttagaaaatgcaaagttttaatgttttctctcatggtcaagatattattaccttttctatcgggtttggtgcatctttttaccagccgaattgagtccttgacaaactgccgactgggctcaacaaactgcattacctggtccatggttgacagcttaaaaaataaaggtgaaaacacaatactcattagaattatttcaaatattagggctttcttaacaattatattctcactattccttataagaaaccagtaactagccaggcgttggtggctcacacttttaatcccagcacttgggaggcagaagcaggcagctctctgtgagttagaagccagcctggtctacagagtgagttacaggacaacctccaaagcagagaaactctgtctcaaaagaacaaaagaaaccaataactaaagtttcttaagttcaaactgttgaaaattagtatctgctatagcagagtttcaactatggtgtaacaagaccctaaattgggtgtaaaagtgtattctcatctacttggtagcaatcatggccatataatatatttaagtaaaagcacatttcacaggatggacagaccgatgaagcatccttctaaaaaacaaaaattggtaagatccagattctgaaaagcctccagctaaatgtttacatttgaacattttaaggttcttttgaaactccattaattaacaagaatgttaatcaactgtaagacaaccctgagagccacaggtaatggtgccacggcatttgtactttatttccagctcttagatggcagatgaaaatataaaactccttaagccctggtttccttattaagtcgtgaaccctggacaacagctgaaacagttaagatacacactaagaaagctatccacagcttgatccaaaaagcaaaggaatgccactgttttctcactgtttcactgagaaaatccacactagaccaatctctgcactcggtggtcaaggagagccactagttcactaagagacctgttgatgcagacttttgaacaactagacttgaacacaatttcacaagacaagcacactgagaggttggggaagcaggctctggaagccataagagactatgagttcaccaacagggctggcaggggatgttctgcgagaaagctgaaccaccaggttccaacgctaagtcaagagggttcatgaactaccgaatacctcctctagacaggtttgactggatacttccacctgaggccacacaggtagatcctgtgcctggatttggtctctgtccacctgcccatcagcgatccagcccagcggacttgtccggatcctgcagctcccaggtctcagctcatggcctccgggctcatcaatggcgccttcgccctcgtctctgcagccggtcaataccgtggcaccttcaccccatccctcattcccgtcgttcccaggcccgctcattccatggcctcccgaccccctcgttcccctagtcctcagacccgctcatcgcgagccccctccgttcccggccccaatcgttccgccgggccctcgcatctccaaacccttgttgtcccccggtcccctcgtgtccccaaccgcccatcccgcggcctcttaatcctctggaccctggaccggctctctccgcccagcacccacgagaaaacccttacttgagggatgtcggcttgagaagcttgagacacgtagcctagaagaggagcgagcccaacggaaccggaagctgattctccacagcccacccattcctcccttcaattggttagtcacgcagagacgtcattgagccggcgcagtgctacgtgtgtctctcccggcttccggagtggggcggaccgaagcggctccggtccctcctgcagaacctgggggtcctgctgggccctctttcccatcactcacctccggatctcgggcgcagccgttccagcagcctcaaagtaaatccatgaaatggacttttagctaatgagtgtctgcatcacagctccgaggctccccgctgtgcatgtaaataatgtcaccgatcaaaaatggaacaagcgttgtagtatgagcgacctaattaaaaataatctccattcccagaaagtggatttctgctggtagtcatgggaatatattcctatagcaggaattaaggccggctacctagcggtttctcatttagctatgaggattaagatgtattgaaggtgctagcaatctccgagtgcaatatttttggggcatgtttgagtgaatacgtgtttctcagataatcttgatttgctccatcattagggcaagagccagcctcagggctttgaagagtttttgctttattttatgagcaacatactgcagtcgagtactgcgattgcaatgttttgctttcatgaggaagaaaatgcaactactgctttataacattattatgcttttcatactttattaccgcacgtctataatctcagcacttgagactaggaggtgagtagatgttcaaggtcttgtttaccttcgtaaagagttgaaggacagccgggcggtggtggcgcacgcctttaatccaagcactcgggaggcagtggcaggcagaactctgtgagttcaaggccagcctggtttacaagaactacttccaggacagcctcaaaagccacagagaaaccctgtctcgaaacccccaccccccaaaaaagaaaatgaaggacagcctgggttacatggaattctgtctcaaaacaaaaacaaaaaattatgtcaaacattcaaacccaaaattaagtactgcaaagaaatatagcagaaaagtgaatgatgtattaatacatcattaaaagaaataatccataagaattcataagaggaactgtgcaaaacaaaaagtataattttaaaaccactaaaacagttaagttaaatataaccaccttgtgacggttaatattatcagcttgacatgatcttgtctagcctaggagacaaaccactttggcatccctgtgaagaattaggttaggataggttagccttcctccctccctcctacccctcttctctctctgacaccattccatgactgggcttcctgatagtataaaaaggagaaagctaactgggcattagcattctctgctttctggtgatgggtagagtgtgagcagctttgtcaatcccctgaagctagaccttccccaccatgctggtaaaccctcaaactctgagctagaataaatcttcctcccttaagttacttttgtcagagtattttatcacagcaacaggaaaaatgatgaccataacccccatgtgggattatagcagtgcaatagagcacctttaacaacaacaacaaaaatagcagtttgtggtaaaagtaatctctgaatctccacaattccaattctggatatttactgaaaattgaaaaacatttgcaaaagggtttttcttaaataaaattccaaaatataatcaaatccaaaaccttacaaacagcagaggtctgcaagagaacactgaacaggcctacagatataaatttggcttagttggcctctctattgctgagacagagaccatgaccaaaagcagcttggggagggaaaggtttatttcatcttccaactcctgggtcatagtccatcactgaaggaagtccaggcaagaagtcaaatcaaagccgataatttgggatgcagagggacattgatagtaccttgtgttgtaatatatgaacttttgcatataagtggagaggaaatgaaaatcatgataagttagtattggattgatggacagtaagggtggggatttatgtagaagggggaactatgggtgcaaaggaggggggaacttaagcaatttgagagaaaaggtaaggctgaaatgatagcaataaaaagcacagtatcagtgttgtgaccccccagtaggtcaatcacactcaatggcaggcctcactcagaagagtgcttgaacaacacaatcaaacttgatgacaaaacaaacaaataaaacccctcaaagttggatgggtaggatggtgaaggtagatatgggaggagttgggaaaagggggtttatatggttaaaatacataaatgcgttgtatgaattcccaaagaattcataaaaatactatttaaaaatatgatgtcaacagtcagtaagacaaaacgaccacccacagaatgggaaaaaatcttcaccagccccacatctgacagaggactgatttccaaaatatacaaggagctcaagaagctagccaccaaaacaccatacaatgaaattaaaaagtggggtgcagaactaaacagagatttttcaacagaggaatctgaaatggctgaaagacnnnnnnnnnnnnnnnnnnnnnnnnnnnnnnnnnnnnnnnnnnnnnnnnnnnnnnnnnnnnnnnnnnnnnnnnnnnnnnnnnnnnnnnnnnnnnnnnnnnngggggtaggttggaggtgggggagaaggaatgggggtggggggagggagagggagagggaaagtacatgtgaaaatattaataatttaataaaaaaatatccaggaaaaaaaaagttaattttaagaataggatataaaatcaaaaaaaaaaaatatgatgtcagataacatgtctcagagaacagagccacagcaaccctgaaaagcaggttggtctatgttttggaaaaggaaagagtaagaaaaaaagaaaagaattgatatagacctgaacagagtacaaccaaggtcacttgctgaattaacttagagtattaaagtagacaaaaaataaaatatacataaatgtagaggatcagagaacggggtggagaggtacaggatatgacacatgactggcctgattactggattcaatcttgagtagcagtactctatccacagctcctaggaacccatgttaccctgagagatcctccatgatgagccattctgttcttttctaggatctttctctgtattctctgagggctccagctgtgaatgctaccactgcccccatgcagcacgtcccaggatcctatataagcattgtttggtgtctatgtgaggttccttttgcttggttctcagtgggttttcagcccactgaatactatgtggattgatatctgtcagtttctcttaggcagttctggtagtgttcttttgcccaggtttcagtggtccactcacttgttctgcctttcactggtgatctccacctgaggagccattgacataacaggaaacttttgagatgatgtcatttctgagctgtaggttgtatcctatgtcttacacagttaagagagagttttcctgtgtttatttctgctcatttcccccatacatatgtggttattgttgctgcatacccacttgcttgtttgtggtgctagggactgaacttatggcttcttgcatgctagacaattactataccattgagctacaccctatcctaagacatattttaaaaatccctcccacataacattatatgctttaacatcttattctttctctcctagtaactaatttaccatacttcagtgagatcaaccttactagattccacattcaagatttcacaaaacttatgacactctggtcttcagtgttgtcacatgtgatagagcttcattatttatttttatggatgaatattattccattgtacattcatatcacattttatatccattcctctgttggtagatatgttagatgactcttatctttactgctataagaagggctatataaacactggggtatagacatctttttgaaattcctctggatacatacccactaataagacaggcaggtcatatgataattctatttttaattttttaggaccctccatatgtttatccataatagctgtactgacacatataaagtattcagtactcaaaaaagtcatgtttaaaaaattatgctaagcatcatggcgcacaccttaaatcccagtacttaaacaactggatcactttgagttcaaatctagcctggtctacatagtgagttacagaccagccagggctttctggaaaagctgagaataaaggaaagatatgccttagactagggaaagtatctttgaaatatatacctgataatggacttatatccaagatatacaaagaactcagcaaaaaacagttagaaaataacccagtgatgatgggggatgttcttctgtatgcaatgaatatctgtttctctaattggttgatgaataaagttgttccagctgatggaaaagcaggatgtagccaggcaggaagtataggtgggtctaccagaatagaagaattctgggaagaagaatgcagagaggagccaccagagacaagccatttggctaccaggaagataagatgcctgggcgttttctggtaagccaagattatgtggagataattagatttatgaaaatggatcaataattaagagacaaccagccaataagaagccttagccattggccaaaccgtttataattaatataagcctctgtatatttatttgggactaaatggctggggaccaggtggaacagaaactccatcttctcaatgaaaatacacaaaattctggacatcacacaaaagaaaatccatagatgggaagtaagcataaaataaatttacattatatttctccaggatattccaaattaaaaacaaggatctactgtacaaacctcttggatgactaagaaaatgagtagtattccattgcacattcacatcacattttgcatccatccttctgttggtactttggatgactccatccatactttgctactataagaagggctgtaaagcataagtgtgcagacttttctttggaattttgttgggtatacacccagcaacaggacttggaaaacatcaagtttcaccaaggatttcaaggctaaaggagctctctactgcttcttgtaggagcataaatgatacagccactttagaagataaactagaaatttcttaacaaagatatccacagtccaaagaaaagtctgcactcctacacttatgcaaagatatggatggagtcatccaaggtatctaccaacagaagaatagatataaaatatgatatgaatatacagtggaaaactattcattttcttagtcattctaccaggtttgtatagtagctcctaattaaagtttccattgctgtgctcacaccatgaccaaagcagcttgggtaagaacaatttattcacattcaactttttttctttttgatttttcaggacagggtttctctgtgtagctttggagcctatcctggcactcattctggagaccaggctggccttgaactcacagagatacacctgcctctgcctcctgagtgctgggattaaaggcgtgcaccaccaacacttggctcacattcaacttttaagtatcagtccatccctgagggcaattggggcaggaactcaaacaggcaggaaatgaagcagaagccacagaggaacgctgcttacagtcttgctccttgtggcttgctcaccatgttttcttctataccctaggaccaacttaggggtgccaacacccacaatcagctgggcactccccccatcaatcactgtcttaagaaaatgtcccacaggctttcctacagggcaatctcatggaagcatattcttaattgtagttccctcttctcacatgtatctaggtttgtgtaaggtccacaaaaaccaactggaagagttctccatactctaccacaataaaagaaaagtctatgctctcacagaaacctatagccatttcaatagctttattcataattgccacaacatagagaaaaatagaatatacttcaaaagctgaatgactaaataaactgtgaagttaagttcacattactaagtgagaggagccaatctgagaggactacgtactgtaggattggatgatgctttgcaattatatgataccctacagaagccaaagctacagaggacagtaaaaagaacagcagctgatcaccaggatcctggatgcagaaagggggtagtaatagagcacaggagactgccagtgcagtttgaacttgtgcatggttctgcaaaggtggcatttggtgtgtcttccagagcttctagaattgtacagagaatgaaccctaatgtgaactgcaggtgttaatcaacaatatatcaatgttggttaatcgatttttgcaacagatgtacactagtactaggtaaaaaagatatcaatggaaaaactatataactatagacacattaatggagttgaagtcataatttatgactacagttgatggggaatgtactctgtatgtttatcttattgattattaaataaaatactgtttggccaatgagacagcaagttagacgggactaggagtcaaagaagattcttggaaatgtagtagagaagtggtgatccaggcaggaaatgacatagcaaggagactcatatttaagcgaaggagaaacaggaaggatccctttttccccttgctcctccagcagcacaatgtgatccactggcaaggagggactccaataaggcgtctgataagataagtcttataaagtatatagatttatgataattaagactgagctaacagatgagaatcctagtcattggctaagcagctttgaactcaacacaaatttctgtgtattcatttgggcctaactcgggcaggtggctggcataaagcgaacatgtgaagtggggctcggtggcttttggcggaaagatttatcgtaacatacagtaagcaaaatgctggactagagaactggttttcattagtaccaggaaagaaatcctagtaaatacacaaccttagagacgacaaagatgaggaagcccttttcaactcaatgcttgaggtcagtattacaaatactttaacctaaggggtcatggtggcacacaccttcaatccctgcacttgggaggcagaggcaagagagtctctgtgagttcaagaccagactgttctacagaactagttccaggacagccagggctacactgagaaaccctgtctcaaaaaaacaaaacaaacaaatactttaacccaatctccagtcttccagataaatctagatacaaaaattcttaaactgctaaggaataaaatccacccatgtataataaacataatttgtcatgatgaagaatgatttcttcgaaattatagaagtgtgttatttggacataataattccacttacacagttgtcatagagtgcttccataggactcatgtggcccataagccatacactcttaaagtatatagtatttagacatttataggaaatgtgtgcaatgttaggtaggtttagtatttctgtgatgaaacaccatgaccaaaaacaagctgggaaggaccggatttatttggcttacacttctacatcatcattcatcattgggtaggatatgataagaactcaagaatgacaggaacatggaggcaggagctgatgcagaggccatggaggggagctgcttactggcctgcttcccatggcttgctttgcctttcttataacacccaggaccaccaacccagagatggcaccatccacaatgggctaggcccttccccatcaatcagtaatttaaaaaatgtcctacaggcttacttaaagcttgatcttatggaggcattttctcaattgaggttctttctctctactaaatctggcttgtgtcaagttgatataaaattagccaacacactatcctattctatactatagttgtttacaataacatattgattaatatagacgacctgcgtatatgaaaatgtctaaaccaattattttgtgttattagcgtatacaaacaatgaggggaaaggtataaatgaatatacacatgtacattttttgaatcttaaacaaaaatctgtgttagggaacattcattaaacattaaaagaacaatatggatggcagagagaggggagtgatgagcaaaggggtcaagactaggctggagaaacccacataaacaaatgatctgaacaagggggagctcatggaccccaggctgatagctgggaaaacagcataggactgatctcagaccccctgatcttgggtgtcagtttggaagactagttaatctatggggcctctcatagtggatcagtatttatccctagtacatgaatgcactttgggaacccactccacattaagggatactctctcagcctagacacatgggggagggtttaggccctgttccaaatgctatgacagacattaaagatccccatggaaggcctcaccctccctggggaacagaaaggggatgggataggtggtcagtggcagtcaggggagaaggggagggagaaggaactgggattgacatgaaaaacaagcttgtttctaatttaaataaaaacattttactttaaaaatagtattttatatgctatggtttaaaattactgaatttaaaaattcatgaataaaagcctatgttctaaaataaagaaaaaaagaaccatagttatgatgaaatatctgaaaaagacacaagatggcgatgttacaccaagaaaaatatacacaaatgcctgtatctaagggtaagtatctaaaccctccaggtggctgaaggtgaatctctagactgattgtcctccacacttttttccaggtgactttagcagtcatctctaatattatgattgttatcttcaattcttaactttcccttaaacattgtaagaacgtttccagcaatcccaatacagtgcaaaaattcggcagtttgctatcaatacaatcattcactgttgtacttactctatctcctcaatgttgtaaactcagtaaatgcactcagtattgccttactttttaagagtgtctggtactcctctcgaatctgagtttgtgtttcagacactcacacatagagggcagtgcaggacagtggatgccatcactcactgtggtgtggaaaagacttaggaaccaaccataagtttgtgcactttaccaattcagtcacctacaggagacagcaccaggttgttaatgaacactgaaaagcattcattcattcattcattcattcattcattcaaagctacctggtgaaaagaaaatggacccatttcccaaactatttaattcagaattgttttctttgaaacattacttcccagcaatggcaaagttgttcccatctcagcaacttaaccagaggtaactgtggtctctaactgcacatgtaagcaacaatatgaagacagcagagacagccggcaaacttgaaccaggaggaaaagacacttgaagtttccattcatatgtcctctgtcctcagggcattccctggccagagctcatactatttacacattgtagagactcaaagaagcaagtgacagcatccagcgcagccacactaatggaaggtggcatgagaaaaatccagagaggaatctgtagactctgtttaaatagtttcttttttaaaaattcatcatcttttatatttattttacttggcaaccacagtttgccttccctcctctcctcctgttccctctccctgccttgcttctaccctcccctgcttccaccccttctatgggatccctatactcccccccctccttctgtgggatccctgctctgacagacactcagtggccaaggccagatgatggaattgacagtacatttcactgctcagtcttagggatgcaggagaaggggttgtaatttggaattgtgggagacaaactcagcctcctgtgaatattttccataattccttgagcttgttcctgaattactctgagctctagtttgcacttctaaaagatgaaggaagccgcacctttctcacaggattgtttgtgggattaacagacgctgtgtgtaagtgcctggaacactgacacttatgtgattagttggtgtccctcctctcttttgtggttacctgggatcctatgactaattccctgcttctggggtaaattccagtggcaaacctccaagtaagtcagcttgaggctctggtcttgaatgtttataaagggctgtgagtttgctccttgcaggcttcactcatctacattctttctgaatcagggttggaaactattctgccccattattctaggcaacactactttgctaaaccttcccaaggggagcctccagattttggccccctctgataaactgtgcagtaagaacttcccaaagatacctcagaatcatttgtctttttcaaactctgttctcttgggcttccatttacttgagtctgtgttaatcttcatgtcccagtccctcagatctcttggtgatcaccggggtgtggcatcactcaattatgtacaccagttattaaaatacctaccatcccttcgccataatgtggattttgagcatccctgcttgttcccaaatgttagtgctgcataaagattgctgaagcctggaggaaggaagggaggtcacttgtgctagtatccttaaaggggattttgggacttcattctctgcctctggttgggtcctggccattacatgagtgattttgctccatcaatgtgctcaatgatatactgctttatcccaggccaaaagccaacttaacatagacttaaactgtgagaaaaagacaaacaaacaaacaaacaaaaaaccattttccatacaagttgatttcctcacatatatgtcataatgaaagggaagcaaattcactctgctcaatatcgtcaatggtccttcatgtttccttccagttattgtccatctggtggccaccctgcagtcctgtaacctagccagtcagatcctctactttctccctggctatgatgctgcaacagcctcctaactggcttctctgtgttcatatgcagctctaccatgctcttttccagttctaggcagtaaacttttaaatgtgttgtcaagtcaggaatcctttactttctcttctcccataacttcttatttcaggtaaattaaaatctgtcctctcgagtgcctctctgctgtcctgccccccatttcctttcaggtactgtggtcccagcttattttctgtctcctacacacatcacatctttccacccacgcctccatatttacttgtttatttaactggccacttgcttttcctccttcccctttagtttgcccctgtttcctaaatgaagtcctttctgggtgtcccgagtgagatcatcctaactgaccctccaccctctctaaactacaatattgcatttggttcttttgaagcatttcaaaataatggaaattatgtttatttgttgcatcatgaggaaattgacataaaataaagtttattgcccaaaagccttcaggagagagtatattcagctctgacccctttagttagttattaaaggttaagctacacatatatgtgatggtcttcatgcccttatccatgttgttagtaaaaaacagtgtctcaagatgctttgtatatttgtgggagtgtggtaggaatatccataaagtacctggttggggaagtggctttgctgaaaaaaaaatcaaccaaccaacaaacaaaaaactacactatcaaaatttaaacttttatcttgtttattgttagctgagtatcaggcacatagaacagcaattagaaaatagtgatggatgagcaaaagaaaaagagaatgagtaatgaggaagtacatgagcgaaaaccaaaaaccaggggaaatttagaaaggtttacttatttatctgaaagtaggtcttgacaatggcccagaagccagtagtgagtggtacctccttttagtcctgaaatactgtgactaaaataagctaaaggagaaagattgtcacatgtgttttcccatcatgagggcttcttccaaggcgtcttcatatttaacatgtgagcctagtgtggtctcatcctagttttggaactatacttactgagttcatgtgcattgtctttcaggtagctgtttgccattaatcagagcatcacggtgtcagatgatgcactggaatcctttgagagctatgccccagttatctggagcaccagtatgaagaaaaccttcattctgtcttgtttatctgaaaccaagatcacagtgtgttctgcttggtttggcatcaggggtgataatgaggttgtttccaatgttagaaggtcaacttgctaatgttcatggcatcatgatcatttttggaatgcttctaaattagaaaagtgaaagttacacaaaggaaacagatgagctaaatctaaagtgaatgactaacaccactggttgaagtactcatcaagcatccaatcagatgatcacattcatagtttttccttttattttttttgtctattttggacttcttgacagtatttctctctactcactcagtagtcgacactagcctgtaactttcagcagtcttcctgccttatcctacaaactagtggaatcccaggtgggagcctcttcactgagcttgaaattcttcttttgaggatttctcattgtagtcgagaatttatcctagagttcctattagcaatctaattgccctcggtgtcacaagtgtaaattccttggataggtgtcattaatatgtaaaaaactataaggtttagtttcagagtattgagaattgtataaagtgaaagggaggtggggtgagcaaatggcttagttagcagctgccatgcaagcatgagggcctgagttcaatccccatatcattgtgaaaaagccaggtgcagtggaacatatctgcattcctagtgtgggaaggaggagacagggatccctgggactttgatgtttagacagactagccaaattggtgtgctctaggttcagtgagagactttatctttaaaaaaaaaaaaatgaggtatagctggtgaagattctgcttgatgaagagttttcttttctgtgtagaaatcttttagttccatgtagtcctatctgtggatactggagactagttcctgtactgttgctattctgttcagaatgctttcgtctaccctaatgtcttgagtatttcctgttttcatctagaagctccagcatttcaggttcaaaatagaaattgatccatttagacttgcttcttacacaaggtgaaataagtgaatctaattccttctgctgctacaaacccagtttcccagaaccttttgttagttagattgtcttttcactgtgtttttgcctcctttggttaattggggaggcattgctttactgacttactttgggatcctctattatgcattgtttcacctgcctgtttctctctttttcttttctttttttttataccagtaccaggctgatttcataactatagctctgtactataatttgagactgggtattgtgatatcatcatctgcatccttacttcttagaattactttggctatttgtgatctttagtagttccaaaagaatactagttctgtgagatatgacatgagaattttgacaggtattaaaatatgcctggtatattttagaaaaggggctatattagttactttttttggttgttgtgataaaatctcatgaccaagacaatttaatgaagaaagggtttatttgacctataattccagaagtaaggcagggaggcacggcagcaagcagcaggcatggtgacagaaggaagaagcctgcagctcccatctccagcctcaagcacaaagaagagagagattcctggacatgggggtgagactaaagacacccaaagcccacctccagtatcaacacttcttctagcaagtctacaccacttaaaccttctcaaacagcaccaccaaattgtggaccaagagttcaaattgctgagcctatagggaacactcccattcaaaacattataggagctgaatatataaagaaatgcagaaattaaatcccgagaagataaaattgccagtcaataggtgggctgatgaattgaatagacagtttcacaaaaagaaatctaaatggccacgaactgtctttaagtgtatttaccatccccagtcatcagggaaatgcaaattaaaactattttgagataccatttcacttcatcagaatgagaattcatcaaatttaaaaaaattgacaagaaatatgagagataaggagaaagaggaacacttattcgatgctggtaagaataaaaattaatatagccaatatggaaatcagtatggaggatcctcaaaaatttacaaatagaactatcacatgacccagctgttttactccataccctaccatagaaatatttgcaccccatggttattgatgctctattcactagagcagagaaatagaatgagcatagttgtcaatcaacggatgatatgctatgaaaatatggtacatatataaaatagaacagtgttcagctccaaaagaaaatgaatcacaaaatttggaggaaagagatacacttagattgtatattattgtagcatgaattataattgatcttaatcataaaaactaggagtcagctttcagggggtgaaagctgaaggatcaaagaagcagagcggccagccactcttacccctataattgctcagaccaaaaaggaatcctatcctcagactgactgcaatgtgcttctgtcttctcccaccttatattttctctgcacagccatatccctccttgtctccacctccttaatgctaggattaaaggctcctgatcacaaatgctgggaccacctttgtatgagctctgttttttagaaaaattcaatcttgtgtagcccagggtaaccttgaactcacagagattcatctgcctctgtctcccaagtgctgggattaaagttgtgtgctaacactgcctggcctctatggttaactagtgtggttagctttgcactctgatcttcaggcaagaattatttgttacatcataaacaaaatatcaacacataatattaagcaaattcaaccaaactcaaaaagataaataaaactgagagttcttcctcatgttcaaattgcagcctataatgaatacatgtatatatgtaaacaagtatacatttgtatgataaaacatttagaaaggatagaaggaaggaataacaaagcaaaaaaagataaaatgcatactagtgaactcaacatatagcatacttctctcaaggtctaacatattttcaatgcaaaataaccccttatatgatcagtgttcacatgagattcaatgagggactgttaccttacaagaaagccaaattttagattatgtttttcattgtttgaatatttctgtagtctgtaatttttgtaattactgctgaactttgttactctttaataattttagctattcaaataataaaatttgctgatgatagttaaaatgtatgttttaaataattaaaagtttgaagtttctgagaatgttgacttaccctgaatctcatggagcagcatgcccagaatttcaaaacatggagaaagctcctttcttcactgtttgttatgattctaaaatacattatttttactgaataaacatacttaaaaagagttttaattatcataaaaattctcagtctctcatataaatcactttttcagcatacttgacttcattttaaaaataaaaggttagtatgtggttaaaaataatgtgaatagcaattggaaaatacatacaacattgatgtctggtctacatacacacaccacacacacacacacacacacacacaccaagtagaaaatttaaaaaaatttccactggagctcattacttgaatcatatttttccaccagtgcaatatgtatgcctcaagtctttcaggaactgaaaaattatacatgatagagaaattacacaaattatttcactatttctccaaggagagcattctaattgcaatgattttagagtaattttaaaataatgattaagacaaagttttatactgttgactaatctttccttaaaattttctccagctttatctggtcccatttttcttgtattcactccctgttttagctgggtttctgaaatgatttcttttccttacttttgttctttacttcttatatttttaaattaccttataaaatagtaatactctatattcaatccgttgcttctcttgggttttatggtttttaaaactcatctgctggactcatggtgaggtggttcagaagtaagggcacattgctcttactgaaggcctgagtttggttcccagcaccaacagtaaaggctagactcacaatttgctgtaaattcagctctccagttccaggagataagactgtgaaaccttctcttggcctccacatgcattacattcatgtataaaaacccacatgcacacataaacatataattaaaaaacaataaaataaacctcatctgctcacataacttctgattttatttgaacacaatatttaagtcaaaggttgctaggtgggtttttttattggttggtttagttggggtgtgtgtgtctgtgtgtgtgtgtgtgtgtgtgtgtgtgtgtgtgtgtgtgtgtgtgtgtgtgttttaggttttgtttgcttggttggtttgggtttgagatacaagtggcttgagactcactatgtggcactatgtggttaggttgacctcaaactcatgatcctcttatctcttcacctagtgatggcatcactttatgggtgtaccaccaaagttagattaagtaaaaatatttaaataatctttctttgtaggcacatctgaaaatggacacattgcttcttaatttcctcacaagctttccagatccaacaagtatctgttctatccccaccatcaaacccctcatttctcttgattactgtgtagatgtacactacctacttgaccaatctgaagaaatgggaatttggcctcattccaccctctcactcaatacattctcattctagcagtatatatgtctttacagtcttctctgcttccccttctatgtcttcattccaatcagaatgacaaattcctttccggttttctcaagctcagtgttcccagaagctaggttctgtagtcctgagttatcagatcttacttcaaggccttttttttttatgagatgtgacctctttatgattatcgaggcttggtgaatggagcaatggtggagaggttaagagcactgggtgcttatcctgagaacatgatttaatctcacatggcaggtcacaaccacctgtaactctagtcccaaggagatccaacatcacccccttctggcctctgagggaactgcacacacatggtgcacagacacagatgcaggcaaaacacatacacacaaaatagtaaagtgacaactttaaaggacgagtgaggttttaaatgagtattcataatatctgatttatagagatcatatcaagataaaaataaagatacaataacaaatgtatcatttgtataaagaatacatgagcgggctggagagatggctcagcggttaagagtactgactgctcttccagaggtcctgaattcaattcctggcaaccacatggtggctcacaaccacctttgaatgagatctggtgccctctgctggcatgcagtcagaagactgtatgcataataaataaatacaatcttttaaaaaaaaagaatacatgagcatttgggaataaaaatttaaagagttaaaggtatgaatgagagggaggggaaggaaagccaaagttacagtgactgagttcagattctaactctgtcatttgcttttctttggaaaagatatctacattcttttagctctgatttagctttgatattagtacctcactcagagggacattttgagaactaactaaaaattacataaaaatttccaacctaactagaaacagtcatattgagtgagataatccatacccagaaagaggatcacaacatgttctcttccattggatgctcttacctccatatatctaagatgtgattacatagcctggagtaactgcaaaaactaggatattaaaaagaggccattgccatgctgtgagggttggggaagcagtagaaaggaagagtgggctacagtgatctgatcttggaaatgtgggaaaacgtgagactaactagggatgaagagggacataaacacagaagcaggaaggaaggccaataatagcaaggatgcttgaaaaaagtcctaaggagtcataatgttaactatttatctaaaattaaatataatacatgtaagtctctacatcagtatacatacttagtttaaaggaaatttttccatctgaactaatggagctccctccaaaagctaaagaccatctaacaaaacccataacaccaggcttgagttgtcagggttgtcaaagagacttccaaaacatttcaggttatgggtgttgccctttgttgtccccaagatgtgaaaggcaggtgcttgctgaagacaccatgagacaggacagaggtccctgactggaactgacctgaaagtcttctccctgaggactagctttcatggtaccaaaaggtaccagaagttaccatgaaagttactgaaggagggaggcaaccaacagttctacttaaatatgacacctatgaattacatcaatgactagcacggcacaataaccctaagggtgcagtagtgacatgcacaccgtgctggtaaccaactgatctctaagacccacaagagggaaattatgcctggtgctgaaacccaaggcaaatactaacggctaaggaagtcatgggtcttggaggagaacctacattgtcactttactgaaccagcctaatctctaaatactttcttaatatttgcccttatacccacagataagtgtagtcctcacacatttaaaaaaaggaagctctttgtaactgacagagaccattagataaaaccatatccaatcaaaatgcagagttttggagctcagtcctaggggatacatctgaaaaacaactcgaaccttaagcccagggaacattgcagaagagggtgtaaaagattgtacgagccagaggaccaaggagtttgctgtgagactgtgtcacctagtaatgccagaacctacacccataaagtctcaccaacatgactgtatatgcatgaactgaacatagacaacaataacagatatgcttaagtggatggggttagggaaggggaagcctatgaatccaatcctcagttgtacacaaaaaaccaagcacctaaggaatactgagagtaggagaaatagttttccctagggtaaagcacaccaattggttatccaatgccaaatggttagccctgaaagcatacatacaagtaatattatacaggtcatatttgtgtatttaggaatatggatatatatatatatatatatatatttcatttatgtaatgaaaaaagaggtcatgaatttgaaagagaacagggagtgttatacgggagggtttacagggaggaaaggaaagtaggcgatgtagttatattacaagtacaaaaaataaaagaaatagtttaaaattcacattctaataattcatatgtggtatattgtcattaatcatatctataattatgcatgactaaagcaattgtatttgaaagctgaaataccaataacaacttgaaatgccaccttaaggaagcaaaactaataccgtgaagaaatatactgtatttatcaacgaatagaacggacacactgacagctattcttaatgaatcctggcttatctggaatggagaaaatttgtggacagctaatgcttacctagaccctgtgggccatacacaaaatgtcttctcagatcttgaaaaagattgtgcaacatgaagcaagaaaagtgagtcacacccctcattcattctgagtgtcttcaaggcttgaaagcatttccgaacactatttcctctgatggaagtgtagaaaaaaaacagatgaataaaccttcccaccagacccctgagggtgtggctgggcaaggagcaggaaccacc

SEQ ID NO: 30 - DNA, 37177 bp, Cricetulus griseus
  >scaffold_22 dna:scaffold scaffold:CHOK1GS_HDv1:scaffold_22:1971510:2008686:1
  misc_feature 30571..30670: /note="n is unknown"
gcctgtgccagagactagagcaatgcatccaccgaagacggtcttttctcctaaacggattggtgttgcccggcgcaaagatcccgtctgccagagaggaagataaaaagaagagtggcctcccacgtggctggtgaacctggtctgtccagcaccgaaggctcagttccttccggggcttctggcaccaatttgacaggtttctcctccaacacagtaagccagatcgagctgaattaaaaagtaaaggaccaagtttatttggacaaagcattcccaggtgatcctccagtccccagagatgaggtgggagaagggggcaggagaaaaatcacatggccagtctaaaggaagggacttaaatgtcctgtaggcacaggggtggtgacgagtcctccacaagctgtgtttgtgcctaagtatggcagcttttaggcggggtcttaagtaactagcaactgctagggtaggagccaccaccgccaccgcagacctggacttttttggcgggtttttctgaaagggcagggtctggagagggaggattgccactgctggatcaagcacgggtgagctgcagattgcagctgaacacacacagagagaagctagaggacagggggagaacgccgagactctcagaggactaaggcttagacctgcccccggtacctgagaagatggaagcaggggagagttacacgcgggtgacctggattaggacaccaccttggtgccggaaccttgaagcacagagctggagtttccccgtggaactctttcagcaatgggaaaccacggtacctacagccttctcggcaacaaacagccgccacgcgtttgtaccacttccggggcgggaacggaagttcccctcttgcccaatagagaggaggcggggaggacattctcgcgagagctcggcaagccggccctcagggagctagctagccatggagggtgagcgggcgccgcttcttagttcgcggcgggcggcggcggcggcggcggcggcggcggcacccggggtgtttgcggggcggcgcgcggcgtgtggggcggtgctgttggccgagctgctggagcgcgccgccttttacggcgtcacggccaacttggtgctgttcctgaatggcgcgccgttcaactgggagggcgcgcaggccagccaggcgctgttgctcttcatgggcctcacctacctgggctctcccttcgggggatggctcgccgacgcgctgctcggccgggcgcgcgccatcctgctcagcctggcgctctacttgctgggcatgctcgccttcccgctgctggccgcgccccgctcgcgcgccgcgctctgcggggacccgagccccgagctcgtccgcaattgctcggcgcccttccccaacggaacggcggtgtgtccctatgccgccgcgcgccgctgcgctcccgccaccttcgtggggctcgtgctcgtgggactcggtgtggccacggtcaaggctaacatcacgcccttcggcgcggaccaggtgagccgggccgtccctgtcctcccggtttagcgccacgcctacctgagcctatacctgactttgcaccaagtgccctacgctgaggacacggggaccgaccgccccggtactctgcgtacctgcgagtgccccagtgttctccaccgatggaaagaacgagccaccccacgtacctaaacctacacccccacttgattgcgcgactgatgggaaagtagggagctgtccactaagcgccccaaacccttcaccctcacctcgcatctagagaaagataaaggctgtgtggagggaagacttcttggcttctctgcacttctcttgtagtgcagagaaggtcacctgcctttgatacctacttaatggaggaaggagacttgtcctgaagggacttccttgcagagtggggaggaaatccatctgccccagtgggcagggggagaggagagcaaggctccttctaatccaggtggggaggaaacccatgaatacccattccacacctcgaaagaggctcttgactggtaaagagggagcctgtatccacatctgcccttgcatttggtcagggactgaaggaggggagggaaccacacccatcctttgctctgggggaacttggcctttagtgtgggtggaagcccttgagtagacaggagaaagctgtaaaaacaggtgtgatctgggtggtaggaagggcttcacctaacgaggtgattatgtgtgatgtgatggccagggcagttttaaagtgaagggacttttcaaatggtgaggtcatttgagttgagatctgaaggaaaaaaggtttaagttagagatttggaggacagacacgtacagagggctgtcactgtactagttttccatttacaaacttatgggcaagcacttagttttggtctttattgttttaaataagttttggagtggcctgggtaggaaagttcaatgtcatgctgctgctctgaccaccaagacgaagacagaggaggagccagagctttggagagcagaagtgatctgctagcgcctgactgcctcatctgctcagcttccccttttagggctctcacaggctaagaatggatctagtggtcaaatgcaaataaagtattttgtaagcagtggaaattatgtggggcttgagtggcaggctctgtggataaagctttttaaggtcctgctctttcctgcttactcatcccctctgcttctcctagacttgtagaattgagtagtcacagaggccagatagatgtctcctaaaacctaacacacgttgttcctttgcagaaagattgcaggtggctgccttagagagtgggttgtgtggcaggtgcatgatagcatagctctggctgcagctggtctaatgagagaggtgtggtctagagtggagacagtctcctagtaaagggatggactcagacatgggaggagggcggtagggctaggtagggtagggagtgccagatagagggttgtttgtgagctgcaggaaaggtgagctctgggtgtcagcactaaactgatccttcagggcctgaaatttaagtcaccaaggtgaaatcatttgctcagagagtagcaccatgaatatagaactgggccatgttcagaagtcttgtttacatggttctaaggttgaccaattcagtgaggacacatctcacctatattagaagtagtagtaatcttagtgcttaagattttgaggcaggaaggattgccacaagtttaaagctagctcagacagtatggttctaggctattatgggctgcggagcacgactcataaaagtaaaatataaacaaaagtagttgctactttagaattatgaaaggtgcttctcacacaggggcagtttcaagcccagactcatggccttggcctctgtcccactagtgcaccttgaagacacagggtcaaaagcacattagctctgtcctttaagtctaggtgtggtgaaatggccctcataagtcttatacattttgatacttggtcatcagttggtgactggggaggatttggtgtgactctgctggaggaagtatgttactggggtgtgggttttgtttgagattggagctgctgctctagccagcatgtctgctgccataatgaactcttatctggaactttaagcccaaaataaacccttccttgtataaattgccttcaacgtggtgtttatcacagaaacaggaaagtaagcagcaaactgggccttaccatgcagcatacctctgactatgcatccctgtgttggcgttgtttgagcttcatggtatacatgggggttccttagactttgcacttacagctccttttcacctgagaacttacatgactccgagagtctaaaatagactgatatcaaccaagtcatgaatttgtttcaaatcagttttttgctgtatgaataacttaccatttattaaagatgaaatccaatttgcatagtaatgagatgggtgtttgcacaacatgatacagtccaaagccatagctccatccttgaaagctgaggtgtgatgactggtaggaaaatattccaagtcttggctgtttgaaattaagccattgtgcttctgtgacagtagaaaaatattctctatgcagtggtaacagtgtgctcatcttatggattagcctatactatactcccataatctagccaaggagtgttaggcatcgtttgttgtagtcataaggtgtgtcagtgtgtgaagtgtaaaatgtgggtggtacttgtgcagaatcaagacagaaggatatcacagagcaaagcactgccaggaacatcttgggaccattgcacatttgattctgaataagttttggtccttgtgcatttagataccagttgctgttgccaggtctctctctctctctctctctctctctctctctctctctctctctctctcacacacacacacacacacacacacacacacacacacacacacacacacgtacgttttgagaagctttgattgtagtatgcttggggtgactgactgtctctctgtctgtctttgtctctgtcagggcccagctgctcagaaagtgctgagggaacagattggatgcagtgtgtcttagagtcagtgttctccagtagatagttgaccattgattagcacccgctaacagaggggtcactgagtgggtcccagtgtgcatacttcattatagctaagaatagtgctcttccacagggtaattggaattgtctctagtatctacatacttatcaccatctggggaagagacccttctagatgccagaatcctagagaaacttgacagccactttgggtgtggtcagtttggtttggtttgctgtttggatttttgttttattttgctatatttttgagacatagtctcagtgtagcttaggctggcctctaattcactagtagaagataaccttaaactcttgatactcctgcctctgcccaagtcgtgtccatcccccaccatccttggccattttatttattcattttttggcctggagtttttctgtgtaacccatgctgccttcaaactcactaagtagcccagacagtccttccgacctgtgtgtgaacgctgctgtgaggagtatgtgccaccacgctgggcttccactgatttgttttggtttggtttttgagctctgcccttgccctgcagccaggcaggcctcgaattctatgtgtaacccaggctggcatcaaactcatgattgattatcttctagcttctgccccctgagtgctgggattacgggtgtgtgtaccccacccatttatccttttgttgttgttgttgtttttgttttttttcgagacagggtttctctgtgtagctttggagcttgtcctggcacttgctctggagaccaggctggcgtcgaactcacagagatctgcctgcctctgcctcccgagtgctggtgcgacaccaatgccgggcttcccatttgtcttttttaaagcctttgttttgggtgcttaggataattgaactatggactgcacattagatggtgggggtgatgttcttaggtgtggttgtacctttgttacatagaagaacagtgtttttaagagattcagtcaaaggtgtgtgggtggggagatgtgtgtcaacactcttgttcacatgtttgtttctgagtctctctgtgtatctctggctggcctggaactctgtagactaggttggccttgaacttacagagatttacctgcctctgccttctgagtgtttttactagtatacgtgtctgtgtcagtctgtgttttcatggcaatgatgtatgtgttgaggtcagaacagcctgcaagaataagttctctcccatttagattctggggatggagttcaggttttcaaacttgctgaaaatgcgtttacctgctgagccatctcgttgcgctgtcccaggatgttacgcttttaacagaaaaaaatagaactaaagatatacaaaaagggtacatcttacattgttttttaactttcctgtaactttgaaatatgtaagtgagaagtaaggtgcagcccctctactgatgaatggctgagcttagtgcatgcagtctctctttgtgaacatactcctcacccacagcaagaggttaggttcccaggggtgttgggagcacagcagtaagtgaaggacagggcagtggtggctttacagatttgaatatacaggagaccatgggctacatttagattcatctagtggcctgtaagttacatccttagcaggtagctgggatctttaaggaggcacttgctgtctgctgcctcatgactgttctttgagggagatttcaaggcctcccttgttcctaatgtgtcagctgctttgcagaagccagatggctggctggaaggatgctgtgccgatgttttctgcctgggttggttgctggcccttgccagttagaggggtgtgctgctgctatctttaaggtgcttctgcttctctggctggtgctgtcagaatgcctttctcatgtgagagatgagccaggctgtggctatgagcaggagtaccaggtcacttcagagtgagtagtgcaaatccataaacagtcactctcaaaggtggttcatttaaaggcaaaatttgcccttagttttccctagtgcttaccagttgccaaagcattcttggttggtgatatctgaaatagtgagcttagtgctactcgattggctgtgattcttgtacatggaaggcagggcaggaagattaggagtttgaagccctcctcagttacatagggagttggagcccagcctgggttacttgagaccctaagaggaagaagctaccatgcatgtagagcagacagcactgcctttgtggtttgctttaattttgagtcagactcctttgttgactgtaggcattctttgcttcagcagagattctgagtgctgggattatgctgaagcatgagtcaggacacccaggatggtatggtgtttgttccaatggggagaggttagactcctgagaatctaataccattctccagttaaacctatactcccttctggtctgctggcctctactctccatttgtctacagtgttttcatggtggtggtggaggggggatatggagagcttgctcagccttgacagggcatgtggtgatgttatgcgactggtatatggggaagctgtggcctttggccaagggcagagagaaagaggcatgtgactgctcagtcagcagcagttctgtttgtgtgctgattgatgtcgtgtggctactgaggccctggaagtaagcctccatgtatgaagcagctctggctggcaggcagccttgaacagtgaagtcagttgaccaccaaatttacaaagaacataaggactctaaaggttaggtagggttctgccatgccaattgagcaagtatttccttactgttttggaggatgagctgtttctatgaatgtggggagatgtatgtggtcctattatgtgtaatgggaagggcttggaacgtttcagttagtatctaatgtttcctgttatgtgcttggcattgtggtgcatgtctgtagttccagctgttctagaggttgaagcagggggaatcaatcatgtaagctcaggaatttgaagccagcctgggcaactgatcccatttccaaagaggtgcttttgcttttgcttttgttttttgtttaaactggtctgtatcctttcagagttgtcaaaacaatgacatgtatatgtgtatatgatgtttacacacacacacataagtattttagatagatagatagatagatagatagatagatagatagagctggtggtggtggtgcacctttaatcccagtactgggcgtagggcagaggaaggtggatctttgagttcgaggccagcctggtctacagagcgagttccaggacagccaggctacacatgtaaccctgtcttgaaaaacaaaataaaacaaaacaaaaagtatatatgtgtttactttgagttttattttctctatttctctgcccttttttttttttttttttctttctggcctgtctccactgtgtcatggatattgatgtccattgttgggtaacatttaaagatattgtgcctctgctgtaagaaactgttacagtaacacccgcctttagagtggggcctttgttcagaactgatatgtgtaggacaaccaagtgtttatggttggttggttcatttggggattggaaatggcacttagtggtaaagggcttacttaatatttgcaaggacctgggtttactccctatccctgaaaaaaagaaaaaatcaaaccaacaacttggatatttaagtttgatgtgactgtaactatctgactaaaattcagatgtaggaattgccagtgtcgtagctattatttggagtttaataattgtcaaaggatggtcagttttgactgtatagtttgcatccttaccttagtcttaaacactctggaattagggtgccaattagaagccttactgcatgtcttacttcacaactttgctcccatttaaagcttggtattaggcaggtgagattgctctatgcaccagaagacaggtgtgctgtggagccaattttgaactcttttcatccattaaggatgaggctagtgatgtgtgtctgtatgtgggtttgcttaagacaatttgtgaaatgaaactgtctaaaatgatgctggctgggactgggcccatcctcagagtgtctttatagatgtaaaaagtataggtggaagaagcccagctaccagcccagtgggatctacaggtttgcctgggggtttgcacctaaaggggagagtcagcttagggctgactttgagtatttcttgagtgtgttgatgagatcttttgtgtagctcaggccagcctctgattcattattctcctgctcctgtctctcaaatgctggcattacaggtgtacaccataatctttttaatctaaagctagtttgtgattgtaactgtttactatgcttccagcttagttgtggacttatcaaagactctgatgcttgggccccatgcaataggattggtactttgcctctgagcaaaccttgctgtccatgggggccagagcctgcttggcaggacctcatagtacttgtgttaagttcagtgaggcctggtgctccatataatggtgccgtgcaggctcctgataatccaatatgatgattctgttgggctgggctgtaggttctggaacttgttttaaggatcattcctgctggcttcgaggtaggtgcttatgttacttgctggcatttggagaggcctccagctcctgaagtgattgagtacaagatgacttttgtcaggagactggctgcacctgtaaacagcattttgattgtgtcctactgtctgctgaagacagggacttgagacaccttatgtctgttctcatcaaggagatggtcaggtgcttagtgtggtggcaaggcttgtagctgccgtgggtggttgggtggtcatttaattattgtaaacaataaagcttgtctgtttagagaataaatgaaaagtgtagaggattacatgttcttatgccttcttttccctgttactttaggttaaagatcgtggtccagaagccactcggagatttttcaattggttttactggagcattaatttgggagcaatcctgtcattaggaggcattgcctatattcagcagaatgttagctttctcacgggctacttgattcccactgtctgcgtggccatcgctttcctagtcttcctctgtggccagagtgttttcatcaccaagccccccgatggcagcgccttcactgacatgttcaggattctgacctacagttgctgctcccagagaggagggcccaggagaagtgggtgagtcacacaacttttccctccctgcagataaaataccagctgaagtctgggatgtgcagcttgtgtgtctggtctccaagccagcttcattcagaaagtttgtggtgtaaaccctgccgtttaactagttgaatcctgagttcagtactctatgtccaacttcctcactgccagcatgggtgaggatgccttgctgcttagtggcaaattttgaaggtagggatttgtggagagtaccgtggagacacatcatgtgctttagacacagcagtgtgttaatgagaacttaggctgtgtgtgctctaaaggaagctgtcatctctctcattggtcagcatgagtggccctcatccagggccatggcagctattctctgatggaggggcacacagacataccttgagatgcactttggggcccatgtacctttacttgaagggggcttgcacagcctcaatgctgattgtcctcagcctggaacttttagaaacagccatgttctgagatctcccccttctgctgctgctgctggtgacctgtggtcctgctctgtgcagattaacgaagtccagagatcaaccaaagaagaacttagatacttctgtgttttctgcaggctgctatgtagagtaaactggtcccttgactgtggttgtgacataagacagactgcggtactatggccaccagagcagtcaaagcatagagagaaccaaagttcagtgaagctcctggaccttggtggtcagctccctttcagtgatttgctgagcctaaggatttctaatagttactgaacagagatggactccttgcccttagagcttcctgtggccctggttgtgaaagtgttctgcaagctaatatgcacatccctgcctgtgcttgtctatgtacattgctggggtatgggaagcctctagtggcagacctgaagtacacagagtgactcctgtagttctgctgatggcacatgagtcccttgtgtgaaatttgactgtgactgtctaaacctctttgtgaaccttttgggaaggctgtttgctctgtcagctttcagatcctgtccaaaaaggagggactagcattgaggaacttgcaaagctggacgtcacccagttccagcagatcctgatgtttgccagggcattattttagccagatagaagcagtgttgtagactatagctgtttctaatctagatcgatagtcgtgggcacacaacagccttttgcagacagccctgatgagaacctttcagccaggatccagcattactccaggacctgtggggtttcagtgcacacatggcacaggaagggtgagactgagcagcatcctggtttcctttaagcttcagctttggaagtctttggggcagaagtaagcagaaagggttggaaagtcagctaagttgtttgaacttgctgtgggcctggtggttcagaaacattacaatgcctgacattgatgtttgcccaggggaactggacagctcttaggattgttgtaaggcctcaatatagtgaggtatgcaaggctcttagcagcctaatatccagtggcgcctttcactgtgctacttggggtgcttggagtgggattgaagagcccaggaagtgccacagctctttgcatgggtctgacccttggctctgtccctgtgtgtgtgttctaggtcgatgtgttcggagggagatgtggtgctggcattagatgagacctgacagtctgatttctcatcatcatatcattatattataatagagctggcccaggggctttttttgagtgcttttgtgtggagtttgtgacaatccaagggtggcatactgtgcacctagcctttcagagcctggacacataggctacacacaagtacagggaaactgagtcacagccttcgtgggaagaacagtggactcttgtctgtgactgtggtgctcttttaatgtcacagcatagagtactaaccatgcaggtggactaggagcttccttttttctgagacagggtctcatgtggttcaggctggctctgtccttggcttcatttctataggagtgattctcctgactcaacctctttagtgttggggttaaacatgtgccacctcacttggtgattgggaagcttcagaccagtggttctcagccttcctaacactgcagccctttaatagtttctcatgttgtggtgacgatcctctctccccccaaacatacagttattttcattgctatttcgttcaaaaacttcttttgctcctgttatgaattatattgtaaatatctgttatacaggatatctgatatatgacccctgtgaaaaggtccttcaacccccaagggagttgttagccacaggttgagaaccactgctttagagacaccctggttcatcagctttaaagtactttagtgataacaacacactgaggggttctgagtggcctgtgagagccctggtgccaaggggatttggttcttggcatcgatgtatttcagagacacatcattagtaggatgtgctcatcgatagataatacaggtagtgcctgtatcaagtacatggggacttgagataaataggaatttggaggagttagggatgttctcaaatgaagacaaataaagtataggaacctgtgactccttcacacttagtctctgtggtactagacaggcagtaggcatttacttcatcagaatttgtctaaaatactaaggtatggtttttagtttatcaatcttcctgaacttagaatatacagattcagagcatcagctttgtaggataaaataaggggctggagagacagctcagtagttaagagcacttgctaaaggacctgggtttgtttcccaccactcatagtcttctacaactctggttcctgaggatccattgcccctttctggactcttgagggcagcaggcatacatacagaacactttcatgtatgcaggcaaggtgggtgtgttggcacatggttttaattatagcagagactggcatatctctgtgaggttgaggccgcttggtttgtgtagcaagttccaggacagccagagctccatagtgagaccctgtctccaaagccaaaacatacatctaggcaaaccactcacataaaataagaaaaaaaaattaaatgtgacagttcagtgaaataggtcctaggattgtaaactccagtgtagacagctgcctttccagtgtctggaattgggaggctgttagtggggttgaatgtctcctgttggttttggtcaggagtgagtgcacagttccctgcagtctgtattggtattatgtagctgggaaagaccttattgctatctggagagctgcactcattttgtaaaagctgcagccagagaggcagaggcactcatagtactctgggatgtgacccacagctgtgagtgaggtgtgggtgtgcaggcatgaccctgtaagccaagaaggcctcactccagtcctgaccccaactctggggtcttgacacagacagctcttgtctggtctgtgtcctaacttcctcttatgggccaataagagcctcataggacttcccagctggtgataaaggtgaaggagtgagtgccctgtcccccatcatccttctgtagcacccatcacggttctttacttcagactgccccttcatcccaaagggagatgttgctttttctgccatcagggcaccctctagtccttctagtgtctacttatgtgaaacagggattgctatcagatggcttaagtccaggccacattgctgccctgtggttgagatactctccctgtgggttcattagacacagctgccctgtccaaaggccctgcggtcagccacgggagctgtgtgtgcagtctacagttagtcacagaaggacttaaagcagggcagtacagagagccgcctttcccaccccagaagtgatttgttaccagagcgttgtcactggggatggaagtaaactaactccttcattttgtttcccaaagtgaaggccttggagtctttcagcaatcttctaaacacagtctgtttgattcatgtaagatgtcgcgaggagggccgttcacagaggacaaagtggaagacgtgaaagccctggtcaagatcgtgcctgtgttcttggctctgattccttactggacagtgtacttccaagtgagtgctgcaggtggctggcttcccagccttgtggcaggtgctgcagtgcagggctcagggctagtcacaagtcaccacagtttccagtcatggactcagattggaaaacctttcccaagaggcagctgagagtggggtgtgtctgcttgtctggactctctagcttctcatttggttgcctggcagctcttctcaaagagactctacagtgagccagtaattgccgtatctgattctgaaaggtggtgtcacctcttcagctagaggagggagggtgtgtgtgggcttgaagaggctctgctggcttacctgcatcatctgctttctttatccagatgcagaccacatatgttttacagagtcttcatttgaagattccagaaatctcaagtatcaccaccacccaccacacggtaagagacctggaggtgattggacttcctttctgtggctgcaccaggtagctgggacactgccactagaactagttcctgattggttacagcctgctgagatcgtgttaactagtgccattaaatggtctgaatcagcccttccctcagcttaggacacacccattgtgagtcagtggctctagttgaagcatcttggaggtcatgtgtgggtggtttgtggagctgctttactgcagctaatgccatgctctgtgcagctgcctgcagcctggctcaccatgttcgatgcagtcctcatcctcctgctcatcccactgaaggacaagctagtggacccagtgctcaggagacatggcctgctcccatcctccctcaagaggattgctgtggggatgttcttcgtcatgtgctctgcctttgctgcaggtgagccaccatctctcttggcctctttatttctcctccctctgccagcttggcttatacagcatgcagctgctagttattgtgctcaagatactgggcagccgctggtgactcttcatcttctgatgttgatttaacaccttcatctcctagggctgcaagctgacagtgggcatgagaggaggagattctgtggacgtttttgaatctcacagttgttagagcttccaggtatcccagcatcaagaatgaggttttgtaggattgtttaaggctcctgggaaactcccaacaaaagtctcaacagctgaggagctagttcctcaggtccctcaccatacttctgcaagggacagtgccctaagacaatcatttccatcattgtttctgtttgctgatgaggctggtgtctggtcaccttttcagtgtcagtgttctgccttcattaatatatgaaaatgttgagccataatagcaatatagtggcaggagaaaaaaaaaagggggtttccacacagttgtggtctaaggaacatggtgctgagctctgctgaagggagcccctatttaagaaagtgcctctgccatcacagcagaacacacactgctgatacggtgcttcactggcttaaagaaatcagtccctcagcttaagtccaggtgctgggttattgagagaactactaccttttctgttgctcaaacacataattaaagtgaggtttgtctgagtgacacattgctttctaagtctgcagggaaataagcagagcacatgaactgggaacacagggcagtcttctagaagtcctagactggaaggaatgtctatccatctgcctcagctgcctgtggcctggctttgtgctcagcatctcttcctgggggtgggggggaccctgcatcctgaagttgtaccagctaggtgctagaaggacttttgtttccttctttgtttttaggggcattttctcatagagctctgtgatgggttttttttttacggcctcttttctttcagtttcattcatggctgaggctctttaaatggttgttctcagagccatgtgagctgtcctatggcctctggaaacaggtgtcaggccagtgtcttaagatttcctgttcaagctctgtcccttcttttttaaagtgccaagaaagtatgtgtttcatagagtctagcacttgctgtatccagacagcctgctgacttgtgtgttgagaacacatagtgtgcagttatcttcccaagaaactgtccttgttatgtggcaagatcataggaaggagctgagctatcctgtcgggagttgagaggcacaggccagcaagctcaatggagacagccattgctgctgcacacaggctgccccagttcaagggcagagactgaggagtatccacagactttgagtagtatacttcaccttatacttaccatcacagggtatacaactctacttacaccatgcctgtcaatggcagctggctttaaaggccctcggttgcaaattgtgtagccttgggcttgtttccaagatagcttaagggaagtgtttccttgtattaggtttcacttttccctttaaaaatttttgtgtttttttttttaacttaaataagtatattcacacatcctttaatccctgcactcaggaggcaaaggcagaggaacgtggatctctgtgagcttgaggacagccaaggctacacagaaaacctgtcttgaaaaaccaaaaaatccaaaacagtttatcttctgcatgtctgtgcactgtgtgcatgcagtacccatgaaggccataagagggtgtcaggttcccctggaccaaatagatggctgagttgttctgtgggtgccgggaatgtatgtgaatgttaactttgtccctaactaccctgcgtatttggtgacgtttctgtgggatttctcaaaatcctgtgagctctggtggattattttaaataaactagttcctccctgtcttctgatgatcatcccagtgtgtgtgtgcgcgtgcgcgtgcacacatgcttttgctgaacagtttgggtaaaattactggaaatttcttctagattggtttgtgcctggctttgtccagagccactgtcaggttagctgctatttgtttacagttagtgacagtggtaaagtcacaaactatgcttcattgcacatatgatggcagcaagtaattgtgactttaggttccctttctttggtggccactagaaatacttactctctacccccactttgacagcatttttcctctcaactcatattaacttcttgtatttcactactccagatatttatttaagttttattatttatttccttatttatgtatttatttgggtttttggaggcaaggtttctctgtgtagctttggaaccagtcttggaactcattctgtagatcaggttggtctcaaactcagagatcacttgcctcacttgcctctgcctcctgagtgctgggattaaagttgtgcgttaccactgctggccttaagatttgttttgaaagattacatttatgtatatatgtatatgagtgcaactacccatgggatccagaagtattagatccctggagttggatttataggtaattatgaacttcctgacgtgggttctgggaaatgaaattgggccatttacaggatgagaaaatgcttttaatctctgagttgtctctccagctctattttttaattctctctgcatgtgtttgtgcatgtgagtgcagtgcctgcagaggccagaggagggcattttgttccctgaagagggagtaaccagtgattatgaggtgtctcatgggtactgtagatagaactctagtctctgcaggaatagcaagtgctcttaactgctgagccatctcctcagcccctccttcttgtttaataatgaaaaaataataatgctgagaatttacctgttgctatataccttgttaactatatttactgtagggtttttctgttgttgtttactttttattactttcaaatttttattttgtgtgcacgtggggtagaggtgtgcaggccacagcacatgtctggagaccagaggtcaacttacctaaaagagttctcctcttccaccatgtgggctgtggggatcaaattcaggtcatccagcttggcagcagcgtcttctgcccactgacatgtctcactgcccagaacttccctttgatttccatttgatctgaaagtcacttgtggcttttcagctctttactatggtactgaggtttgtatttgtgcttttgttagtgatggttcattttgtagagttgcgggagatcattagttcttaagtagcaccaacttgttactaaggtttctggtggtggtttcccaggtcttcccctccacaccctgctgtgctggcccttctgctacctcagacccttaacatgtggtgcttcattttggttctgcccacagtctattttatttccttggacataggcaagtttttgagcttcatctaccgaactgggctcatttatttgaaggagtccacattaattcagcattttctttttgtttctgtgcctgtggtggtgtctttgaggacttgggttgctgcttacaggactatgggtaactttacagtgtctatgccatgagggaagtatctctgcttcctcacccccctccccattgactgcatgcaggtcctcattcatccccccagttttaaaaagatgaacagaatgaataatccagacccttgagggttaaacttgacatagtgagtatctataaaattcactgtgaggtagaggtggatgacatgactgtgacctgcctcggaagctttcatggtcactctcctttcttgcacctaccagaattgttgacaaatacctgtaatacactgcagacttagctgaatgacaacattagtgctccactaacctgcttctcaattccaggaatcctggagagtaaaaggctggacctggtaaaggagaagaccatcaaccagaccattggtggtgtggtataccatgctgctgacctgcccatctggtggcagatcccacagtatgtgctcattggcatcagtgaaatatttgcaagtatagcaggtgagcctgtgaatgctggtggcatctgggcctgtctgtatcataccttgcagtgtcctggtgctggaggtggggtaggcggttgtggcttagagcatgtgttagttaatcgtagtcctcaggctgaggctgccctttcttgtgcaaacccagtgttccctaagatattttcatgagtccatgacctgccctgtgtgtgccctaggaatgaaggggaagtgtctgtgggagtcttctcttgacttgtgggttcccagcctctatgcagagcacagctgtgctgctgttgcagacttacatgaaggagcttgttgtcatgggcctctgtcactagtgagacaccacaggataaaggcattagagtagatgaagcaatgggaagagaggaggtggtgatgctcaggtttgggggagggaggggagaggaacatgctggtgcctcacctgtcaaactcaggcagaattctgtaactagtgacagtggactttgctttgtcctacctggtcacttggaatctcagtttataggtgcttgaacctattctgctgtgttgattgggaagtaggttctgtatggagagaggttgtgtgtcaaccccctcccccgcaaggattcattcattttatatgtatggtatgttgcctgcatgtatgtgtatacaccacatgcatgtaatgcccatggagaccacaaaaaggcatcagatcccttggaactggagtcacagatggttgtaagcctccatgtggatgctggaaatagaacccctgtcctttgcaagagcagccagtgctcttagccactaagacatctctccagcccccgaactcttgacttcttgagagaggctctaacactgcagccccactggcttcaaacttgcaacagtcctgcagcagcctgttgaatgctaggatctcaggtatgagacaacatttgtctgtcttgtaactaaacttcataagatctttagtgagcttggtgctcttgcttgatgtgttttaagagccaccataggatgagtggtcggcaccaaccctgacttctccaaccaggcgacagtactcctgagagtgctcagacctcagtggagcctgtgtgtgctgctgggaagctagctcctcagggtggcctcctcatggtgactaaggtgatctcagtgtagcctccttttccttttctctaggtttggaatttgcatactcagctgctcccaagtccatgcagagcgccatcatgggactcttctttttcttctctggcattgggtcctttgtgggctcaggactgttagctctggtgtctctcaaggccattgggtggatgagcagccatacagactttggtaagattctgatgtctgggatgggaaagcagtgtgcttgctgtgggatgtgtgaagaatacagtctgtcccaagaggccattggcccaaaccttgttcttaaagtctgcattgcgtagcactgccttgctagctgccatgtccagcacagcagtctgcccgagctgagtaaggtagtgagacctgcatggcagctcctgtgtcagcttgatctgaagctttggtttctggatggtagaaggacaggcagtgacgttgtcattcaacactgttcttggtcagtctgctggatgcttctctgtgcagctctgcagtactgtgggtaaaccaggagctacagcattctttgccttttaaacaagtacatgttccctgtgcaaatggccacactgtgagcatttgccctgcttggtagcacctatctactttttttatatataactgtgaaaaagtcaggaatttttctctagaaattgtgggattcccagagccttgacttggattccttggaagtcctggggtaatgcccagaaggctgaaacctcctcccactgggtacctgtaactgactctgtagctatgtgaggtcagttgtaaaatcagccagctgatttgaggcttgcccttgctctcatccacctgcaagggtaacagccctggagtggctcattggttctgaatgccatggagtcagtgtgcatggcgcaggctttcccaaagggtcatcacagagaccaggattctagttgtttagtttaaaacagttattattatatgtgcatatactacaggcaggtggctctcatggtgcacatggggagggcaactttgtctccttcctccatgatctggggatcaagctcaagccatcaggcttgcatggcaagtgttgtttgctgagccttcattttagacagggtctcactctgtagcccagggtgtcctcaaagtgcaggagtgccattcctacttaggagacagtggtaagatagtgtctgaaggggccagggtgaaggaaacagtgcaaccaccacccagccccgcccccctcccagctcaccaagagacacagcatcactctgatcacctcctcatctgcagtagtgctggctctgtctcccaagtctgaattttaggtgggagccaccttgcttggcttagactccagttctttagatacattgtttgtgtgcagagttgactgctcttggtgatcccattcccactccacacctccttaccttattcactaatttagtgtcttaatgtccctggttgtttctgttaggctgcacctaagcctctggagagttcctttgattgcagtgcttagcaatctatcactttctccaggcaatgaggtcagtgctgtacaaaggcctggtgtaaccttgggagagatcagatggagtgggtctctctagaagaatgcctcctgcagaagggcacagtagctccaagccagcacccccttctccctccaagtgcacagccacggggccctttgctcactctcccctgtcccatgttagcattcttgcagaagaggggtgtgaccagaactaatatagtgtccctggtaggctagggagtctgtgaggtctcagggctccctagactttggttgcactgtttgttttactctacccctttgaacactacctcatcactctaagtgggaatgacactcctgtccctgtgcttctagtgcaagtcagctcagaaccctgtcgtgtctcctcactgccgaccaccctggccctgcacaggacacattctgttctctgcgaatcagcctccagcacttaatgttctaagaggctccctcacaggattgtgttgcagtgaacttgttcattctgccctgtagggagacactgtaaccaggcttcctaagagctggctataggtgtgcttaaccacacctgtcagggcgtggtcaggggaggttcaagatgacgcgtggggagttcttaaggtgcggcagagacatgggagctctctctggcctccctagcttgctgcctctgggcaactctggcttgtgcttggccggtattatttggataaagatatcttaacctagaacctctcagtacactgcctgattggacattggtgtttccagtgttggctttatgaaaaagctttggtgggcattgctgctcaggccttccagaggcaaatgcactctcatttctttctctggggacctggagtctgatgaaacacaactttttttttttttaatgttctgtctgtgaccacccaggacagctgcttcttggatgataggtacatgtttgaattctctgcactcccaaatgagactgggcctgggaaactgcgctatgctttctgctctggggctgacaatgtggacataatcacactgcccacttgtcctatcagcttcaacactgcacataaaattacatcattggtacatgtaatttttgaatcaagttgcatcaagtgcccatctcttgtagtcacagaggagacaggtcctggagtatgggtgtgtcgctgatcacaagggagcaggtggagctggcttccatttactgactcaatcagtctttggtctgtgaggttcagggtaacagggctgtttccctatgggcagactgagggcctttgtcctccctctgcatcagaatcttgcacatatctgtattgttgtgggaacacatgtctcgtacttgctgatactgcttgatagacatgtgatgctaatgagcatctgctcagatagtaaaaggatgtgtagaataacccagtatttattaaaagaggtcaggaggaggaagtctcaccttctgaataaacactagaacgtgcttttgaagtgtcagaaagtgcaacaacttacagccacagcattagttgtgtgccagttcccttctgtgagacaagtcacctagacctactccttgacagccctcaggtgacatgaatgatacctgtggctcatggggacaggagctaggtggtcatcctgccactctgtcatgtgtcttggtcctgggtcaatgctgagtagtggtgatgctggatcttttaaatatatcttggggaacagtgttttacagaagcgatcatgccaagtggacagcattgctgttggcactgcttcacccaggcctgagtccttataggtacagagtcacagtggagaccataggcttgtacctttcagcccagctgctccatggtctgtggccttgacctgtgatgctgcttttatagtgagagcaaggtgtattcattgcagcagtcaggactacctgggtagtgtgtgagaattggaagaggttaagacctgaaaaaacatctgtcttgctctagtgggaactgcctgtcacttgggaaggcctataacccccatgacaatgctgtctaggcttagcactctgcagcatttgatgagagaaatgacatatgggcttagtccatcttcagaagtgttgctctgtgctgaacacagacagtggctttacgtggagtgacggagagcacctcagaaaggcagaagtgaatgctgtgacctagacaatgcagtcaggagctgaagcacaggaagcttctctccagattgtctgtttggaggagacagaatgcaggttaccatcatgaaccttgtctgagctgacaagccttacaagccttcctcagtcctgtgaggatcttcccagtgtcagagctagggccaggacagttgccttctctccttccttttacccaatgggataacccctgggagggacatggctagtgcagagtgctctctcaggtggctaagagccaattcaaaggtgccctgtccatggagtgcactcaccaggaggtgtctgttcactcctagggaacatcaatagctgccacctgcattactacttcttcctgctggctgccatccagggagctacactgctgctcttcctcatcgtgtctgtgaagtatgatcgccagcgagccagagcggatggggggccagccagtacaaggacctgatgcagacagccagcatactcacgggttctgcagactgtaaggcctcagtgcctactaactgccagggcggtgtcagcaggcccattgagggagtgttggtgttacaacttctgaacttgcatgttgtctggactggcttcccctccctctgcccagatgagtgtggtgagtgccttactgtgatctgtctcctgtgcactgggcctgccagggaagaagcatggggctgagaatatggcttttcttgctgaaggtttctgctagtcctgagccagccgtgctttctcttttcgagtcctgggcagccactgttctgctgctggcatccttattccttacactgttacttcttcctcatagcatctcctttatttaagattagcaagcacttccatcaaggggggtagagggtcctctttagagatgaaagtgtggtcgatgacgtgagggtccctaggagcagcatctgctcccctcatagtctctttcttgttacaggtcttggtgatgccaaggcctttgggtcagtagtgtagactcatctgagagtaggttttgttggtgaggtaagggaggtctctttgttaaactaggttggcttcatacttggagcctccttctgcctgccacctgagtgccaagatcccagatgtgtgacaccttggtcagaaggacttagttcttgaaccactgatgtgctttttaaagcacttgcatcagtgatcctgaggacactatgtcctcactgagaccagccagcagctggcagaagattggaatcacaccaggcagatctgctcctagaatcttactctgtaggttgagactggaggcaggggtgagtggtaaggtaaggtggaggcaggggtgagtggtaaggtaaggtggaagcaggagtgagtgagaaagcctgggagctgttgggctggttaccacctttgtgtcattactcacatacctggggtttgttctgtgtgttgctgtgttttgtataattttataaaagcttctcaaacatgacatcaagagcttcctgggtgatttctccatattctgcttcagtttggcttcctgcaggtttcattttatggcagaaactgctgccagcccagctcagccttttcattctgcctctcacacaccaggtggaagggctttggaatgaaaaacgtcaactataccccttattcttgctttaaaggggaaggtagttctgcagagctcaacttacatcttaggggaagctgggtgctgatgtcttaaccttctgtcacaatgtagacttcctagggctggtgagagtactcagcagagaaaggtccttgccgccaaacctgagacctacagacacaactgaaggaaagaaaaccagtttacatgaatgacctctacacacctctgtgaacatatgcaatcgtccaccctaagtaaaacatgtcattttttagaagtaggttttcttcacaggatcttttgtatttatatgaaagaaggtcacagaaaggaaactctgactcctctgcgtgtgctctaggcaaggtgcctatggcctccccagccctgtgacaaatgtggtttgctgaaaaagaacatacacaaaagaagtacaagaggggtgaaggagaaggtagataatactaagctgggcctgtagtataccagagatgtgctgacctccaagtcatcacactgtcagaatccaagaggagggcagaataggtccaggactccatctcttgtctgccttcttgagtctctccaaaccaacttaaggtgaaagacagctagactagcatgctctatggtgacaacccatgctacaaacaccaaagggctaatatccaggggagccatatttgccttttttgtgcctgtctggccatatggacactgaagagggtgggaaaagataactcctgggtcccaggactgtgatgtggagggcttctccagaccttgtccctagctctgccctctgatgggggatgtccttctgtatgctgggaatatgtttctcttactggttgatgaataaagctgttttagccaatagccaggcaggaagtatagatggggctaccagactaggagaaagcttggctaacttagtcggtagagcatgagactctcagggtcatggggtcatgactcacattgagcaccactagtgggtgtatgtttctgtcctgcccggtctcacagctcttcagtctatacttcctgccaggcattaaccaaaacagctttattcatccaccaataagagaaacatgtatttacagcatacagaaggacataaaatcttccgttttatttagacagaaaagagatgggggatgtccttctatatgctgggaatatgtttttattattggtttaagtaaatgctgactggcctgtagccaggcaggaagtataggtgggaccaccagactaggagaattcttggaaaagagagagagtgggttgccagggagaagccatgtagctactgcaaaggtaggacgctggggcattctccggcaagccaagattatgtggagatgtacagattaatagaaatgggttaactaagagagaactaaccaataagaagcttgagccattgggcaaacagtttataattaatataagcctccacgtgtttatttgggactaaagggctgtgggactgggtggaagagaaacttccctccttagccctcaatgatcatatggacactatatatgttatccccccatccctacccccagctcttgggtcatttatctctaatttcccctctagaactcaaacctgaacttcttagatattttcacagggctaaaagagatgtctcctacttgatcataatgatgtgtccaggtttgctttcagtctcctatggaggagtttgtcttcagctcatgcagataggcctgggtacccatccttcagtggtccatcagtacccagcacattttgttattaccatgtggagccccgggcagaggttgcagcagctagaaaaggggggctttggtagtttgaatgagaatggtcttcatggggtctactgcaagagcaacaaatgcttttagcctcttaacccccatacttattttttgataacagaattggggctgttgaaatggctcacacatctgacaccatctgaacacaaagtaggaactcaactttttgccttcagttccaagtaaaaagggggttcctgggggttcccagcaacagcatagtggctcacaaccatctctaacttctaggcaatcagattccctcttctggcttcaaccataggctgcacagacatgcaggcaaaatatgcatacacacaaattttaaaagacatcagggacatctaggcagaagggagacttggggcacagcttgcttttcaaatggaaacactaggcagatgcaggacagcagccagtagcttctctatttctctaagcaaggtcattttaaggttctgtgtgtacttttggatgccagatcattttacagcattctgaagaccccaggaaattggtcaagatggcttccagggacctgagggaggagttgggttggattgtgacctcacacctttgatgggttatttcatctgccctgctagctgttaacttccatcacctctgtgggtggtaggggacaggtgtcagtagttggcagagtactgagtagctgcctcctaacagggcagaacttctgactttgaaaagactagcaactggcaagaagactccacagagcaacaccgcaagtaagtttctctgtgtctgtcatggactgacacctcacattacactcctttatatcactccaatcaagccaatccatgccatcccacacccattagcaatggcttgtaccatgtggaaagttcatccaaaagacctcattttagtgtggtctcatcttgtctcttcatgtcccctgtgaatgatctgaccaaaggctgagatcagagagccagcccagtgacctcagggcaggaggaggagccatgattacagacactaaatacatcctcttgtcccaagtattggcacagtctgcacctatggctgctgcctgctcacaggacaggagcccacactgcccatgtggcaaaacaggaagagccaggaaaggcagaaggaaccctcctcatcagggcctggttctagagcattcttagtaggctgggaccctctgtggctttgaccagactggtgtgattgaggttggactccccctcttggcagaaagggaagtctaaagtgtgaggctgggctcagaatgtggagcagtgagtgcagtagagagggagggtatgttccatgtctgaaggggagcctgagcctccagggggttcttggatgcacttaccaccatggtgtggaagcaacactacacagccagctcacccaactggacagagctaaggaagtgaactctgaatctaccccccaacccccaaggtcagtgacacagtgctgagcctagtctgaaaagctagaaatttctctgcctcaagggtaaaacacttggtttgattgtcccaaggaagatgcctctgaaagggagagctttgaagtaagttagaactttacagatgtgactaccaagtacaaatgataacaaagtcactagtgatctcagaatttgtgtgtgtgtgtgtgtgggggggtgctttttgttttcctctgtggcccaagctggactggacctcaagacctgaatgtgtagctcaggctggcttgtaactcgaagcaatcttcctgcttctgcctccgagtactggggtcataggtgggtatggacataaccaacatacatgtatacacacacacccctttttcttcttctttatagagacagagtattactctgtagtccagactggccaggagattgctaggtagcctgggttggcctctaatgtcagccctactcctttaatcttcctgagtacagaattacaggcaaaagccattatgtcccacccatatccccatatctggcattaattttttttttttggtgagacagtctccctatgtagctttggctggcccagagctcctatgtagatcaggctgacctcaaactcagagatctacctgcttctgcctcctaagtgtaccactatactcagctacttattttgtatgtgtatttgtgtgtgcctgcaagtatgtttgaacaactcatgtacagtgcccatgaaggctagaagatggtgtcagatctcctggaacaggagttacaggtggttgtgagtcaccatgtgggttctgggaactgaacctggttcctgaaagagcagcaagtgctattaattgctgagccattatctctccagctccaccccacacctgtatctgcttttttttttttttttttttaattttatgtgtatgggtgttttgcctgcatgtgtgtctgtgtgccccatgcacacagtactcttggggccaggagagggtgttggaattgaagttacagttgtaaactgtcatgtgagtgctgggagttgaacccaggtcctctggaagtgtccttaaccactgagccatctctccagccccatacatgttattttaaggagcaacaagtctactttgtgacttagatggacctataggacctattcaaaaataaatatttcaatcccaaatctcacctgtacatattatgttgatgatattattgccatcaaaatgttaaattctttatattggtgtcatattttatgtaaatattataagtttttacaggtccagtgcaggctaattacccttggcaaatgtgtgtgtatcctctcagtttcacatttgtatatctataataatgtaccactgctgtttttataaaaagtttggttgggccatggtggcgcatgcctttaatcccagcagaggtagacaggtctctcagttcaaggccagcctggtctacagagtgagttctagaacagccaggtctacacagagaaaccctgtcttgaaaaaacaaaaggagaaggtttgatgtactggagcactcagagatgagtgtgtactgcccttgcagaggacctacattgttcttgggacctacgttgttctcgnnnnnnnnnnnnnnnnnnnnnnnnnnnnnnnnnnnnnnnnnnnnnnnnnnnnnnnnnnnnnnnnnnnnnnnnnnnnnnnnnnnnnnnnnnnnnnnnnnnncacacacacacacacacacacacacacacacacacacacacacacacacacacactcctctctcctctctgtctctcacaaaatttcaagccatgttagatcagttcattctgaaacagaaaatgaatttatctagttaaaaataggaactcagggctggagagatggctcagcagttaagaacactggctgcgccaacagaggactcgggttcaattcctagtacccacatggcagctcaaaactgtaacttcagttataggggatctgacaccctcacaccaatgcatataacagaaaattaaattattttaaaaaaaataggaactctgccaaaagattcttgctacagtattcaaaacaggatcctgtgatgtcaaaagcaattctcacccatctcatcctgtgcctttgtggagaagtttctgtactgcccactttctaatctgctctctctctctctctctctctctctctctctctctctctctctctctctctctttctctctctcactcattcacacactttaaccactgcagtttgctaaaagcatcttgaagttcaagatgcctgaagatccattgttttaaataacctgattaaaattcccatctccctgaacagaaacagtaagagtttccatttacaaaaactcattcaatcccacatagggcatgtagagtcccacaatagttcttcaaagactaaacagttcagaagtccaattgaataaaggcaccaaacaaaaggaacacagtgctttgttgaagttttgacattagctaaaaatctgcggtgccttctcaagtacaggtgctctgcatgtattgaaacacccaaaggttctgggctaggatgctgtttatccatcactgtgtaatgactgcccaagttgttcagcaccttaaaccacacacacacacttaacaccccttctgtggactggagagacacactttgtagtcttgggagttgttaggtcacattagctattgtgtatagttttctgcgaagagattgttctccaggctccctctgagtggctgaagagccttgggctctcctggctgtgacagtgcctcagagctgagggttgggaagacacagcaagaaaaggcaaaatggatgacagtaagaggcagagcctttgttgcccatgttacattaaacttcttattggagcttgagaggtggctcagaggttaagagcactggctgctcttgtagaggatccaggttcaattcccagcacccgcatggtggctcacaaccatctgtgtcactccagatccagggttctgatgctctttcatgggtggtgtaggtacctgcacatgtggcgtatactcacacacatacataaaaaagtaaatctacccgagctagtgagagatcactgactccactgacaactggggaacctgcctaatttgaactagactccctgaatataggtgacagtggtgagactgggacaatatatgaggccactggcagtgggtccaagatctaacactaatgaacaagctagatttagtggagcccattctatatggagagataccttgctcagcctagacacgggggtgggggtgtgcctcggtcctgcctcagtgagatgtggaacagacttagtaagacttactaggggaggccttaccctctctggggaacagatgggaggcagggtgagggagagaagggcgtgggagaagagggaggggagactgggattggaatgtaaaaaataagttttgaaaattttgttttcatattactgcagaaccaaatatcttcagtattgattttttaaatctgaacttgcagtcacattcataccattgctagctagttcatattcaaaggaacaatatttcaagagtcatgtttttggtttcatgaactgagtaaattctacctctgattataatgcctggtgctgttttcaaagcatgagtatgaaagtcatgtcataaatctgagtatgctaacaaaggcagcacttgcctcttccctcaggatgataaggaatcagctgggtatggtgatcacacttgtggtcccaatacacaggaaggcaaggcagaagaatcacaggaagttcaaggttagtttggactacagtaagttccagaccagactggactatagagtgaggtcctgtcataaaactcagtaggacctggagagatggctcagcagttaagagcattggctgctcttgcagaggatttgagttcagttcccagcatccacatgacagcccacaacctcctgtaactccagctacaggggatctgatgccgtcttctggcctttgagtaccgcatgcacacacaaatacactataaaataaaattgtagaaaacagtgagtgctctaaagaccccatgacttccaccatcaattctggaataatccatgctaatcccacagtgccatttaaaaaaatcactgactatacctgtttgcagttaactcaaatattttgtgtaggctttccttctttgaggcaggatcatatatagctaaggctggccccaaactatgtggctgaggatgactgtgaacttctggtccccttgacttcatgtcttgaatgttgggagcacaaacatgtatcacgaaatctagtttatgccatctaggggatagaaccccgtcccttgtgcttgccaggcaacttctctatcaactcagccccagcccctaatttacttggttttgcactgcatttgtttctgtcaagacccatataagctccacaatgagattaagtggcatatataatgttttatctccatgtctgttttctgtgactctgttaattaaggtcacaccgacatggcattcattggctgatgctgggtgaatctattctcacgtttccaggactttcaaggcacagtcatggcctagtttctgtccccctccagcagtgtgttctctcatggagtcttcaaaaagttgtcaaaatgaccactcatgtgttggtttggatctggatggtccctcaaaagcccatatgaatgtcagcatgttcttgggtggtggtgaaatcttcagtaggtgaggcctgggtagggggtagggatggagttaggtcactggggcatgcccttgaaggggcactagaacctgagtcctctctctgcttcacaggcatgatgtgagcaatttcccaaaggggtcgaaagtaaacctctttcagacttcctcaagtactttgtcacagtgacagtaaacaaacaccctgattcttcacattctcctgctccatgtgtaacagaaaagtcagcatctctctcttcctgggtttctgcaaagagcttgatgggagtagatctccttgacccactggttctcatccagccctgtgctgtccggcttaaactgggactttgcagccccccaagcttcaaggtcctaagtttcctacccactccatcgggagctgcatggtcctagaatgttttgttttgttttactactgtcaaaaatattgaccctctggagatagtagacaccggactatccttcataggtttttttgtttgtttgtttgtttgtttttaaattacttcagctcaaggaagccccaaaggagagcaaatgcttttttggaaaatatagagattaaatacagaaagagatggacattggggaatggattcctatgtctggtgggcagttctcaggggactcaaggatggggagaggctggacctccttttgaatatgcacaggcatattttgaatgtggctcactggcacttcccattaaagtggctttgaataagacaagatggattcattataggaaaagtttttcagagaaactagagaacaatagacccagtgctgaggaataagggcagctgacgggacccaagcttccctgctcctgattgcaccagactttgcacttgatggtgtgtttgcagcctttaatcccagcactggggaggcagaggcaggaggatctctgagttggaggacagcctggtacagagttccaggataggctccaaagctacgcagagaaaccctgtttcaaaaaacaaaacaaaaaatggtgtgtttgcttcccaaacttagtgttgaaatcacaatccctgctgcttctgcccagtgacagtgggtaagaattcaccccaggaagaagatgctgggtgtagacacatttgtatattgttagggtttggatgtgaagtgtccccacaggctcatggattgcaacatggtctccagctgatgacactattttgggaaactgcagaatctttggaatgttggggtggggcttgcgaatgatagccaggtcctacattcagtccccactatcctccactgtctgctcctgttctggccatgtatcaggtagctgccatacacccacaccctgccatgaagctgtctgccttttagcccctcagtgatagcatgaattatctacttcgtgacagtatttagagtcatctaggagatacgcctccaggattgtgatggattatttagcctgtgggcatgcctttggaggattatctaggttaggttgaaacagaagacccatccactgtgggtgacactagttccttggctacaatcatgaattttatagaaaggagtaagatgggagctggaaagatggcccagtggataagagcactggcttctctttcagaggaactaggtttggttcccagactcacatggcagctcacaaccacctgtaactccactttcaggggatctgatgccctcttctggtctccatgggcaccaggcagagagatgatccaacatcttaggtctgtctgaaggacaacatgaatgcaatgtagtttggaaacagatgggagcagcaggtgacacatggttccatgttgtgtccaggaatagtaaggactgtgtgactaccaggttaccaagatgttctttctgtgacctggcccagctccaaacaactgactatatgaaaaaacaaacccatagtgagatcccatctccatccagctggaagtgccaaggactgtcatcaagaaaacaacaaatgctggtgaggatgagggaacaagggcccttacacactgttggggggatatgctgggggagtcatcttggacttcctggaaaagaactaaaagcagatttggagtctgctgatgggatagcttcaagtgcttgaggtagaccattttgtcctttgagggaccaacccatcagttgaagtggacatagtaaggaacccaaaagtcttggacttctggagctgagtccaccccaaggagtccacactgcccttcatctgtctccctgacagtagtccctccaaatgaagggtcagagccaggtggaggggtcctatccaagtgatgctctgagctacccctcacccacatctagcactagcaaagactgcatttacctcgcccctgaatgtgtgactgtagatcagcagtcagtccagcctaaggctgggtactctgcttgggaaaccttccttactgttctgcatggtggtagctgagaacaagacatcccctgggtgggagggggagggagagagaggggggaaggaagaataggatgtgtggtggttccacgtactccattctggcatcttaattccacttatcaacagcccctcccccatccctgcaaaggaacccccaggcctctgtggctgatgaatcacccatttgccacaacttctgggaactgctttctgagtccctccctccccgattacatcctcagtactacatggtctttaattactttcccattgatttctccccctgggagccagttgcagctaaggtgaaattcagggctgatggaaagttcagcatgttttacacgctccccatctgggctaaggactcaaatagataagaaagtacttgccttcggggtacctaagctaagtaatggagaagtctggatatccaatcaaagtcttaaagtgctggtcatagcctaacatttggagatgttggccaggaaatgtaactggagctttccagttgtgaacaaggttaaagaggctctaaaaagtctcagcatggggtagcatgtgcacacccgaggcagagacaggtggatctcagtaagttccaggccaacatggtctacacagcgagttctaggtcaagcagggttacccagtgagaccctgtctcaagagtgctcaccactgagctagttctccaaggatgctggctccttggtgggactatcctttgaggatgggatcggctactctgcataccctccccgcccaagtactgagggaactaggtcaaaatcatcctgaaaaaacctgctctggaaccacgttcctagatgctgtggcttggacaggagtgcccagagatgcatgtgttgggggcttggttcccagcaggtggcgctgttgagaggcgactgttcctggaaggtgccaacatcttcagggaatagcccaatgagttcagagctgaatgggctacaaggaggaag

SEQ ID NO: 31 - DNA, 91929 bp, Cricetulus griseus
  >scaffold_24 dna:scaffold scaffold:CHOK1GS_HDv1:scaffold_24:4856485:4948413:1
  misc_feature 49109..49208: /note="n is unknown"
  misc_feature 75819..75918: /note="n is unknown"
aggtggtagcccgtggctttacttgaatgttagctccgatggtctgagacacaggttggatctggtggataggacttactgattcttgatgtctcagcacagggaatgcatagtggtagcattgcagtgagtctgttgttcatggctgacacctgaggaaataagaacattagtcattaattggctagtaatttggcattgaacaaagaaatggagtgaggagggaaatggcttgtgaaccccatatgcattgtttgggaagcctcttgggtaagcagtggctggcccacagaagtagcagctggtgacagtggctttcgacatcataaaggccacctgccagatttcggtcttatttccacatattagcctctgtggtgactcagctgggcctctctgaccaaggtttgctgcagcctgtttgtcagtgttgagaaagtggtgacagagatggcacgatggatggggcagttccccgccatggccactggacactaatttgtagatgatgcaagaccagccttccctgtccaggtcacggcacacacttgactaaagcgaagcaatgccagaactgcaagcagaggggagacagcaaagcaggtcaagggtggatgtttgttctgacccagccttagcgctgaaaggtaacttagatttttggctcatcttctgagtctccacttttggactctggtcaccttgtacagcatgttccaggcagcaatagctgtgactagacatacagcagctccagcccctctactgatagaagacaacaaatgattggaccaagaaacaagtgagaacaactggtcccttcttggacaagtggctcagtccacctcctctgtttcagttccagatacagccaccattgtctatgttccctgccctgcactaaacgaaccaagcctgcacacctggtagcagcccccaccaacaaggaacctgatgctctcagagtagatggggggcaggtcttcctgttagttcccacaggcaaaagccatgccggatggcagaagctgcagagcagcggaggggtccacttgtcctggactgtcccctttctcgataaccacctggctttttctttttcttgactaagccctttatgcactcactgtcactgctgggagctcctgttctctgattctacctgtgctgtcacctgtggtccctgaaacataccctgctctattcagtttgcctgccagcataaatggaaccccccacccccacccataaaaaagagatgccactttgtttgtcgcctaatgacactgtaactgcttccatctgtctctcgcctctgccgagcttgttagtggcataagctgagtctggctcttagaagccagtggcctgtgagaactggttctctccttctccagggatcgaacttgggttatcaggcttgatggcaagcacctttcaccacctcatgagcccaagttctgattttctaagtttgtctttctgcacacgaaagcacttttctgggtaacaaggtttcaggagaaataagagcaagccttctgtcacactgcccctgcctcctctgcagaaagcttgttttttccaggctagggaatgccctgtgtccactagtctggtgatcagaggacctgtaaccgtttatggctgggcctgcttctgccttgtcctctccagctgcatgttgttctgctggctttacagagccgccttgtgtaaccaggtgagggtcagtagtagattacttttttcagcaatgtcacaatggatatctgaagactattccacaacaatgtttctcaacctgtgggtggttaccccctgtcctttcacagcattgtagcctaagactaacagtagcaaaatcagttatgaaatagaattgaaaacaattttaaggcttggggtcaccacaccatgaggaagtgtattaaagggttatagcattaggaaggttgagaacagctgatctgcagagtggggttctgactggactgggatggggcacctacgtgtccaggactgacgtgtgagatgttccacctccatcatagtcatgtgactttggtgttcttatatagactgaataagaacaagggattccacaaagatttgtttccttcttgtagaattccatttgtggaactccaacaactaaatgcaactgagtcaccaggaaaagaaagtggcagaattgctttagaacttgctttgcctccctgaactgagacccagaggcccctcagtgtctcactggggtatacccttatcagccttacctcagatttgtccctttgactccttttttagagcacagatgttgggacagtggttactgtcttaacctgagtgttcccaggcagaccgtgcagcattcagccatgctagactaggctccggtctcccaggcctacttgggaatgttacttagtggtctcctaaaaggaaggaagcacattgacaagtgggtgcactgaagtgagcaaactatggcttctgtccctaggttatttgcgggtgtcttcccacgaatggcagcaatcagcatgggaggcttcatctttctgggtgcctatgaccagacccgcagcttgctgttagaagtgggcaggaagagcccgtgaagcagacagtgtgtcctttgagaagaggactgcgttgtagcccctgtcttcctgcgagtggcccagccacccaagcagcgaagtcaacaaagtcgatgctgcagtgttgtgccttgaagaggcctgcagagtgcagccctgagtgtggtccaaggcacaggctgtccccacagaaactgtccttggtggacctccagaccaatacctcagacctctcaataaatatcttggtaagctcaggccgggcccttcagcattcttgtgtgattggtgtcctatacttcctgctatctgttgagtcactaaagagcaagctggctccaattggaagcaaatgactagactggggaaaggacgggggcttggggcaggaactgtgcatgtgggtgtttctcccctgggctaattcctattgtgtaagattataactttgtttaaaaagcatgagctgcaggtgcatagcatgcattctttctggtaaggaggctgctgtttttaattaccctcatatttctcctataaaaacacatgattatatattttatagcagagtgccccaaaatccccagtgtgtgagacagcagacagctgcagttccagtgagtgagtgggtgggcccaagtgactttgggcaggagcatggctaagggaagcaaagccccatggccaccactgtccttcccagaggcctggccagagctgctcctttgtcctaaaggtgtgtgcaggcaacactggctgcaggagatgggagccagcatatttgtgcggtgtaaggcttaactcgctagccccaggtggcagaaaattggtgaactatctgtggagtgtagcatagcagcacagcatcttctgaggcaacagcacacacgatctatggtgctttgtatgtattctcctttgcgggaagtactattaaaagcagaatagctgcgcttagaacaatgaccacagacacacttagtatttataaatgaacctttattaaagacactttaatgccatttgttagacacttcaatatcttacatgttttcaatgtacactgtaccaaaatttctataaataaataactctgtacataaaaagtaatacttcctctttcacattgcctctcagaagcagcaaattcacatattttgtggaagtaacattaatcagccaactgtggagaataaacttctgaatgtgctttgtcctggggcacagtacactgtgactcaggccatcactgtgtcaatacttccctcagctttcagggattttaaggaccgagtttgtttccatgtagtttctattgaattacacattggcactcacaagatggttagcaacaggaccccaaagtgcaaatcacccaggccaaggactcagtgaaactgggcttggactgtacaagactatgtgagggaacatgtggacaggcctgctaagagaaatcagctggccctagacatggcagaactaaaccacactattggaaaatccacaggtgtaccaacactgccttaacaagcttcaaagaaccattggaggcagatgagacatttgcttgtaccgagtgagttacaaagaaagacaaaaggcagtgcttaattgttctgagcttttggtagattaacaacctcaacctcttcctccgagacagaccctgaacctagaagaaaggcaagtgtcacgtgcacccagctccaaaatgaggccaccagaatgacaactgcagagatgtggccaatgcgcctgaacctgactcagccagaacgccctcctttccaacccccagccacagctaatgtggttttacctgaatctcagctgtgcgttaaggcaccagaactattcctgaccctctccaagattagacagcaacctagtgtgaaaatatcactgaaagcgggacccatgcgctaaggattaaaatagtctctgtaaaagatatataatatatatgaactctctgaaaactcttatgtacaatggtatcaaatacttttcctgcctttgtacacaaatagtctcctgcatgtccgtgctccagatgtcaagtcctttagccaactgacactcgacacggaaggtacaactgtccagagtgacatctggacacacacttcccaccgcttctcctacctctttcctgtagcaaccgctttaaaagagctgaggtagatgaagcctagcttttcggtgccaatagcaatggtcccctccgtttcccagtgagctgtcctgtcagtggcatagactcaggactagagtcacaggcctgggggaggtggccattggaaacaagcaagtgctgggcttcagtaggtatggcgtcttctgggagctctgggctgcctgaagttaacgtaggagaaggctgtaggtctatggagtctggttcatgtaacttggctaaagtccaagaggaatctcctgtttaagaaaaaccagagggcgcattagcctgtgcacactaaccccgtaagggctcctaacccaccacgatgcacctttaacaatacttacctttcccatctggggatgcccccttgttcttcaaagacagcagtattctgtcatggttacttggatagagggatcccccagagtgggtgtgagacccatcagcagtcccagtgtaagggtggtgtggagaacattctccgttgtgctgcctgagctcttggctgcttggtgtacctggctgtccactctctgtggacacaggctggggactggatgcttgttccttaggctgactgtctgtgtcagggttgaagtcactgcatacagcagagccactgtgtgctgaaggaagaacagagccaacagtgaattggaaccagagcccctgaagtctccatgccctctcagaggcctgactggaagatgagtcctgtttcccactgcctttgtaatacccctggccccccctggaatatgcacatggagaggagctggtcttttctactcagtgtccacaggaatgactttaggttgcacactctgatcacagtgaatgaaggggaagtgaaaggacagatctgtattagaatctacacagagatgagtcttctggacaactggactcctgggagcagggctggggaggtggctcagcaggtgaagtgtgtgatgagcagaagcatcagggttcaggttcccagtactctcagaaatgccaggcagtgtggtcacccacctgtaatctagggcttgggaagcagaggcaggaaatcctggagcaagaggctagttagagcaactatcagtgagaggctctgctcaatacataaagtggagaagagactaggggagacacatcaacctctggccaatggctgggcattgtagcgcatgcctctaatcctagcatctcagaaagctaaggacagcctggctacaaagtgaaagaaatcttgtctggatgagacaagacaggccaggtacgaggatgcaaaccaccatggttttgtggtctttgctctgtaagttccttataagtttaagaaaactcaccctttggttcagcacatcatagacttacctaagggacataagactctaagatcaaaggaagccagatcttccagtttgtattctgagtacaattcagagacagtatgagagcaacaatgtgctgctcctcccatttactaagtccaccccgatttcagtgtcaaaagcaatggctttccctgatcaaagtgacccttacctgttgtatatggagcagtggtcctgtcagctttctccatcactttccatggctctctagtgtatccaacacacagcttgggctgccggcatgtaatgctatgcacgtcgacctctgggaagaggctcgagtctctcagacacacacctgaaatggagccccttataatttagaagctgcttaaggtctcttagtctagtggacaagctacagctcttccctagcacccatcctttggcatccactggggattggttcctatgctcctcaagagatgcccaaacccaaggctggtcaggtcccttctctgaaatgatgctgtttgcacataaactgtacaccttctctgatagaccttaagtcatctctactcacagtaccagtaacaatggaaatctccacacatattcagtacagacacaacttttctttcctgaattttcatctgtggttgattgaaccaccacatgtaaagcaccaacagtagtgtaaagctagtcaggacctggaatgtcctttgcatctattcttcctggcaatcctaccttactgaagacacagtgctaagcccaatgcagggacttctggcagacaaaaccatagaactgtgtgtacacaccagatccaaactcaaagacctggtttgccacatgtgacacaggtacccagcctaccccaaggaggaggtaaagctgtatccaggacacagattagagggtttcactgttcttgaacttaccattgctttcaatgtgcccactggcctgatgaccaccttcagtcctgatcacagtttcctgcctgtcagaaagggttccctgagaggagaggtagcttggaacatctggaggcacaatggtttcgtctgcaaggagaatgacgattaagtaacagggctgcctgcctcaatacatacagatccgtattcacagtcacaaggtcacacacactacagtggtccgaaagctctgcagctgctggttagcctcctttataacctgttgtaaacattatggcagtcagacacctaactccacagagatggaggacctaacaaaaccacaagatggtgaaagcttgggaacaacctgattcatgacaacaggcagggccctaatgcccctgaatctccatgaagaccagaaactgcagggcccagcaggtgcttgaacttgagtgttcccatctcctgatatgttggactgcaacactcactacttccgctgtcccctgcacagcctaccatcctgctgacctgtgttagtgacgctgtactcctcactcttcttcctggtctggtagatgatgcacacccacaccagtgaggtaagcacgatgctgcagaccacagcaatggtaaagatgcctatggtggtgccatccttccggcagccgggggtgggcagaatgctcagttggctgtgtgctcgctcagtgcccaggggattagacatctcacaggtataccggcctgcatcctctgctgccacattctgaacaaccagcagttggttgcctggagtaaaatggtgtcgctcagtgaggctcagcgggcgacctcctttcagccaggtgatgcgtggtgtgggactccccattgctttgcactggagggccactgtttctcccacagttaccacacggtcttccaaaggcactgccagggacggagtttctgcaggaaggcagtagagagtgcacatttattctatgggtcttgcctactggaagtctacttattttccagacagaagacaatcccacatagtgatgaaatgctatctgagaccttttactggtgcttcaagcttttcagaaggccaaatgtgactaaatctttcccatttctaggaatggcctcaacagagcaaagaccttacgtcataccaaactatcctattagatagacttgagtactcctcctgagcaagatcacacctaccaccaccacctccaacatacacacacacacacacacacacacacacacacacacacacacacacacacacacacacacacacacacggaattcttactcaaacatacagctgagtactttcttgctcattgccttttatgagccagagccacttgcttaaaagcagccccaaatttcaaactaagtagaaagagtttaccacacctatctagaaagcagatacctgtaatacttgagttttaccccatcccaccccgccacatacactaccaatagcgaacctaggacagtcagggtagcatttgctgaaacagagccagccgagttctgggcagtacagctatagacacccatgtcgtctattttcacatcggtgataaagaacacatcatcatcgggcatgacatgcatgcgtcgctcacgagctgcagggaaatcagtgcctccatccttttgccatgcaatctgggggttagggtggcccgtggcagcacactcaaggcgggctgtggtgccagtccggatagcgatgtcatagggaattttggtgaatgatggcaatactgggagaaaaaaagaacaggtaaaactatatgggatggctgcatgtaaaagcagactcctggcaaacagatccccactatgcctaggtctcagctcattgctacaccaaccttcccaggagtacccaggttctccccctcccagacacaacacaacactcattatacttaagcctacccactggaccatcaagccagaggctcaacccacacctaatctccatatccgctagagcactggttctcaacctgtgggtctcaaactcattgtagacctctatatccaaaattatttacatcacgattcataccagtgaccaaaaaatcagttataaagtaacaacgaaaataattttgtggccgggtgtgaccacaacatgaggaactcaacaaaaggggcacacttgtttagagggatggggattgacacttgtgccaagctgctttgctcccaaatataccatctactctaagggcagaagctaacataggacccagggatgcttgaagtctggaaaccacatctcttggcttatagaagacagtaaacagataaaaatacaaggcttaactctacaatgtcactttacataaatggactctgaaagtcacccatcccaaactaaaaccaatgattcaatctgtaaaacttggtctgggacaaacccaaggaatggtacaaagaaatgtaccccattgcagcttgtgtctccttacaccaatgacaatcaagggtatggtttgtgggactctgcttgaaaagcacaagatgtcatttccctaccgttcacagtaagcctggccttgtgcgagtacgtggaaccaaagtggttggtgatgacacactgatagcggccttcatgtccgaatgtgacatgacggaggtgcaggatagtggtatactccatcacttcgccatcctgtgcacggacatgtgcaaagttctccatgtctgcattggccaggacctcattgtccttcttccacgcaaaggtcattggggagctgctgctgctggctgctgagcatgtaaaacggatgtccttgcccaccacagccatggtcgtctcaggctgggtaatgatctgtggctttggaaagtcatctggggagagaactaactgtaaggcaccttgctctctgtgtacaccagctgctagtcaacctaagaaggaactgagtgagtcatttctggtcacaatgccagcacagttagttccaccagacatggtgagagttgtgctatggctctcaggccttactgcctccttggctagaaataaacccatgcctactcaactcatcaaaccagacttaggttttccttttgacaactatgccaacttgacccactttaaacaaaatctccaggcaccatcagtcatactggtagacataattccaaaaggactgaggttcaatgtattttgagtatcgggactcaaacacacacaggtaaaataccaaaacaatggcaaaaataattttcagatttgtggaagaccatgtttaatagtaaaccatatctttttgatttcaagaaaaaggacacacctcagtaatgacagtgagcaatacaatgttttcacatatccaagtctcattctatgtccccaggtctgtgtcaaacttgaaacctagaagctagcagccagtaagggccagctccctcaacagctccacagagaactatcactgtctggagcttccaggaaggagcatgcagggcaaaggaagccctatgctgagcagctgatgaactggtcaagcaccaatgttttaccccacagctgtttaggtgaccaccccagccctagcatttgggcagctggagaagcaactttcaaagggaatcaggtgtagaagacaccagtaatgggcaatgaagactccaaaagacctgtgagaatttagaaggccacatgggtctaccaagctatgtaaacacccaagggaggcttgaagggtttctcatttctttcctgtgattgggctgggggacctgcacaaacagaaagtgatgacaaatcccaacacttacagagatcccagggaggggatatgaaactcagtaaggatgcttgtgtcctattgttagccaatcactaaaataaccaagcagaaacccaaggggctgtgcagagcaggctttatggcacagacccaggagacagccctaaacaaacagcagcaaccagcccaggaagacagcatgcagagaatctgatccccacattgaacatactgttttatttttgttgcctacttttcaacaacaaacttaggaaatatatagctaagaaaacagcagtcaggagaaactgaggaatcctagatcctgaactttttgtatctaactataaaaatagtcaaaaaagaaaaaccaactaaaggaaccatatataataaaaaccatgaataccttaacaaagagacacattataaaaaggaaccaaatacggttttaaagtagaataaatgaaattttataaaatctcttaaagcagctcgatagcagaactgagttggtataagagtataaacttgaaatggatcaatggagactatctactgcaagaaaccaacaactgaaaaaaaaaaaagaagaactgaatagatgcagaggctatgccacagcatcaagaggcacagcaccatgaggattaactggagaccaccatgacaaaaaagggaaaagtttccagaaaaatgagcccaagcatagtaaatctgatgggaaaaaaatgcatgccaggttcagtggactacaagtagagttacaggagagctacatccagatgcactgtggtcaacctgttaaatgccaaaacagccccagtcactcattacactagaaagatcctccaaaacacaagcagctgactgctcgacagaaaccagggaagctggagacagtagaaagacatacccgaagtccttacatagaaattaccaactaaatctccatatccagcaaaaacaccttccaaagttgagggagtaatttaaacatttccagatttttaaaagggggcaacctgaagtagaaaatttcttgcttccagacctacactgcatatattctggacaagtctttcagactagatccaaataccaaagaacaaacaaaacaaatccaaacactgtaaaggaatttatacaggtaagtataaaaatcgacacaggccagttagtctagctcaactagtaacccaagccctagttcttagtgacagattcatctcaaaaaacacaagttggagaggtcctgaggatgacatccaaggttgacctctggcctccacacccatgcatacaatagaaaagtatacagataaaacaaaaccaaacctgattatatcagcacagttgagatataaaatcattgtatagtttctctcacattcaactgcacctctatttctatgtaagagtaacataacatttttacactcaaactagaaaacaaaaaggaaaagtaagtaaataaatggagagttgagaagtgggaacactatgtttatgcatcaggaagacaatgcagtcagggtggccatgctcccaggctaatctagagccagtaaaatgccaaaatcttagtttcctttattaaagaaatttacaaattaataccttatagagaaatggcaagggacctataatagccaaagtaatcctgacaaaacaaagtatggaaggagtcgctgaagttctatagtcctcaggagaaagcagaggagtaaggcatcaggaccttgtgtgagggaggcattggttcctaaaatgacagcacaaactacagagtgtggagagcctaggcgctagagaattgtaagacttttgcactgggttgtcaacaaagtgatttaaaaaaaaaaaaaactcacagagtaggagaacatgttggcaaaccatgattagagcctggaatatagaaaagtatttgcagctaaagtgcagaaagacatgacatggacaaattttgaaaatggctagctttccaaagatgacacattcgtccagtaagcctgtgacagtttgcccctactgcaactaagttgtagtgaaaacaaatgtcactgtggaaattagcatccccatacattgtcagtgggcatgtggagtcacgaagcccccttgggaaaacagattcagcaattctattctaggtatatataaacccaagaaaacatacataaaaacctgactgtgtgcagcacattattcaaaagatccaaagaatatgcacaacctaatgcccaacatctgatggatgaacagataaattgtatatccatacaacaggaggccatagtgccactaaatgagtacatgttaaggaattctacactggggtatagttcagttctagaatgcctgtgtagcatgcctgacgtcctgaatttaaaccccagcaccatcaatacagaactgagaacttagttacaacttgtcagaaggagcaagctaaatttttgtatagtcctatttatgccagctgtctagaacagagtgatccaagatacaactggaccactgccttcaaaggatctggggatagacttgggacaacaggggcagcttaatagcatgggagtgggattcttttagaggctattaaaatgtaaaatgagtaataataatggcattaattttgatttgtctaaagtcactttaacaaggtaaatttttacagtaagttatatttcctttttaaaagttttattcagctatatctacacatgtaaaataaacaattcagtgtgtctttctttagtatcttcaaatagttgtaatcaccaccacaatcaatcttaaacatttttatcacctcaaacaggctgtcctcctttttagctcttccccttctatctccaatgctccccaccccagaagagctggtaatgtactcttcctacctcaacagatttcccttagtctaggcattctgtgacttcatttacttagctgctcactgtcaaaatccattcatgctgagacagactaactgacctcatgtcccatgggacagctacccacctgttgtcaagggatgggtgtctggtagctccagcttgagctgttatgaggaacactccttgagcacttggtcagagctgctcccatccccttagatgtatcagaagagtgggcccagcagctcacagtgtactgtttacacagtgaagctccctgtgcagcacctaagggagggtacttgcactcagctaacttcatgctaactttctagaatgtgtaaggtagctgtttctgtttcttaagaaacacaatgggagacatctaggagaatttgaacctctgatttcctaccaaggattctcatgggtagttacgaggggattgctgcgatgccaagtgtggcaaggccaccagctagggatcaggtacagttccatgagtgcatgcaaacggacgactgccctccagcaggagacagacagaggaaacccaaacaagttaatggccgtggactcaattagcactggcctcgtaggtggggcctactttgctgtgactacaatgctctttgcacaaccctggattctacccagggagtcaaagcaccgagaagtttgcaaacctgctctaggaaccaatgtggtgggaggtagagaatgagtagaaaaggggacatttgtctcacctccagcaggcataatgaaaaagaaaagaggctggacaagtggccctgggacacccatggttgggtcataagtagcactgtccaggaagagatcctgaagctcagcaaggccagaggaaaccaatgacaagaggttgtacactccactcctgctcaaagcagcccagacagatctcaaaggccgcctcattctcggagtccatcttcttggctatgcggctatgttagtcctgccagggtacgcacatgcgctctctctctctctctctctctctctctctctctctctctctctctctctctctctctctctctgtgtgtgtgtggggggggggttgggggtgggtgtttcagctgttctgcattttctgtgctctttgtaactacacttggatcctgactacccctggtcagaaagatgttgacagctacatgttccagcaatctgaagaagaaaagactctcaccagtgcacattgcagtggtttgaacaaacagcaagagtgcaagtcaacatcgaggaattatttttactacagtggctgttctcctgagacccattcttcctgtgtttaacctctcattctgagggctggaaagaaatacacattgaaaccccatcctcatgcactgtgtaaattcacagccaaacccaggcaccaggacccttctgaaaggactagaactatcttcctgtaactggttatttagatttgtagctgaacctactcccttctaattaaatacatgtactccaagaaccacagaatgaggcaccgttcagtaaatacatgtggtttccgtgggaaagaaactgcacccagcagctaatctgtaaccatggaccatattaactagtgtcataggaacaagtcttataatgagaagttccttctgacctctctgtccttcttcatccaccaaacaaacaaatctcaagattaatcttaccacacacaaaactgtctggcagcactgagaaaatgctctggcccttcagtgactctggatgggcacaggtggctgtcacaaaggtctgtagcatcctgcccactagccatgggggcagccacttgagctggcagtcacagaggaagctctcactgctgatgtggctgaaagagaaaacaagaggtggacacttaccatgtgcccattaagggagggggctcccttacacactcccacaaagagcaaaatattacaaccaatcagctcggaagtcaggacatcaagctacaaagggaatgtttttccttgtggttcttccagtgactgggaaaagctcatgcagcctccctgcagattcaaatggagtacggcttctaatggaatcagaagggcagaacccaagatgcctaacaagctcccaagagataccaagaatgcctgtccaaagaccacagcagcaccttgtgagtttacccattccctaggagggtcaaagctcctgtcgccctggggatgccttcccgtagacgcatcccgtatgggagagcacactgcacaccaccggctcaccacatttgataagctgtccaaactaaaaccagctttaaatactgcaacaagtcctaaggaatcttgtcctgtgtggctgttatctttttatttggcaaaactgtaaatgtttttaaacattaaatgcaagcttcaccagcacaccttcctcttgctggagtttaccatcacaccagcattgctggggagagcagcaaaatttggctccacctccagcacagtacttgtgagttaactgctgctgcagcccagcagccatgagaacactcaactttggtttcgtgaggctccaaccaaaacagagaacattttcatttttcagcaaatggggttatacttccaaacagaaatcagaatggccatctgagcggacattccttctctaagagtcattcaagataagtcacccagagtctagctgcctggatcctgaaagagctggagtcttgagttagagtgacactagcccacagccaaggagcagaagacagtaaatgtgtgggcttcccatcatgaagtgcctgtggtatgtggtgacaaagggggcagtcccggcacatcctattctcacagcgaaaatgaactagctttctgttttctgttcatctctcctaatgtctgatgagcagtgataatgtagaactagtgaacagcaaggaggaatagacacagcccatgacgtcacacagagtgaagtctcctccttcctgttccacagccccaccttcagcctctccagatcactttaagaagtaattttccaaagactcgactcttttatctcaaagcattaaaatagggatgctggtccctcttagacaacagtaccagaacaaggtttaacatttgcatttgatgggcaggtagtattctgctgggagatctgagggcttcctgctaaggggatactgtgatggcagaaggccatcagcactacccatggtaaagtgactaattcatacaccacacaaggaggcaagtgtcacaggaatgagccctgtgtggtggcgggctggctgtggcaggccagatgaaggaccagaaggagtgtcccactgtcagaatcactccttatcaaaaagatacctgtgtgtggtagagtacatcagacaagaaaaggcttagagaacaaggccagggcattgctgggagatgggacagggatatatttaagtttatttaaattttagacataggaacaaatggggaggaataaatctcacttcagcctttgttcagatgtatgtagaaagattcaggctttggaccacattcagtacatctactgggctcagcgctaaggtctttagtgaagcccaccccagggaaagaggccaggctagacccagaaaaaccatgggcaccaggaatgggaaggcttttgtaagcaatgagttggaggaccagagaacacagggaatgatttggagctagacaccagtgagaacactagctcctggccaaccatggcatccatagttagaggctaaggccagactgagtggatggtgggaccatgagctgccccaagccctacagattccagtctttttgtcactcaggcaaaactcctctgtcaccactaataggcagtgttttccatggctcatgccttcaaccagcccatattcattggcttactttgtacattttcatgattccaacaaaaagcgtgtttctaatcattgcttgtgaaatctacacaaaggctgactaagggcataaaataatctgctgtgatctgatggagaggaaaatgaccaagcaaagtgaatctctttctccactcaaaggactgggccctgagccagccatgatctgagaacattagcagttgaagggaaaccaggcaagagaccaaggctgagcctccagaattaggacatagccagccaccttgctcacattccaacaaactccttcaggaaacccctctcaaatacaaaatctaacctaaaagatgaaactggtattctttaaaaggtgacgatccattttatagaagatattttatctaacatatcagaacagcatttcatagactctggcctgcaggcccactgtctgtttctgctggtgtgcctttagcagctgcacccatttgtctgggtattattgctgctgtctgctgtaataacacatctgagtagtcaggacccagcccctatgacccaaaaagtccaaactgtttacgatgtcagcatttcagaaagaaacttgccacccctatccagagttaagccccatgaggcatgcttcttttaaagacaacttacatctatctaatctgtaaatgaccagagctattgcacaaagtgagcataatgcaatttcagggcttgcttattctcagtctccactcatgtcaaccagggcataggttcccaggtactcacagctctttaagattcttcatctttgcaaaggcatcaaactggatagacctgattgcattctctccaaggttcctgaaatagaacacaaacattgatgtataggaactgtgggcccctgtcaagtgtgtggcgaggaaggatattcagggatcttccaggctagccctggttcacagatgacccccacaagagctgcccataccccatgtgccagatccactgggagtggttctcagttctcatgtttatgcaagcacacatgatgacttggggaccgagccaactgtaagagcagccttgaagctaggtggaaagctgagaaaaaaaacatttactaagcagcataaaggctgaccttgattcaaagaagaataaaactaagagcgaggcactagaggcatccactcccaacaacagtatgaacatctcaggattagtgctgcctacttccttccaaggtcctgaggcaagcatcccagtaggaaagctcccagcatgggctaggaatggcttagctgctaaaggtgatgggtgttgactggctttgccaggataaagtatccttatgaaagcagcaagagctcaggtacccttcaaggagtctgatgcagggtggtgtagtccagcaggtgggagaaaggtatttgttcaaataccagcttcgttaattaggagcacaccagcagactacatgctctttgagtgttcctggcataggcaaaataaaggccaaagttgaagctgacatataatgagaagaaagcagatggtgtttccaaacagcctgtttctcggtttacaaagaagtgattaaattgctcgcagacttccccagcagccatgtttagcaggcctgtggggcgggcagagtctggcaggatacttacaggtgttccaggccttccagccccgagaatgctctcttagccacagatttgatcttgtttccaaacagagttctgtagtttccaaacatccaggcccagagtaggcaggaccaaggagcattaggaaaaataaaacacaccattagggcagtgctacctgacaagtgtctgagagaggcaggcgcaatgctgacctgtgcagggattacgtggctacagtacgcaggccattcccactctgaaatgaaatacctctagcattactacaatttcatgctgatgacagactgaaattgcatgttccactcagtcccaagagaccccttgtagtgtcaaatgaaaatcaccatggccaggccatgctgtctgtcctaggaccacccaagggggtaggaagttagttaaggaaaaacaggctggttactgttttagtgagagacgtcagaaggcagtgtaaactggtactaaaatctgcatgcactgcattgtgggcataaagggtcccaagcaaccagaagagaacaggaagatgggcagccatccagatggccccatagctctttccatctgtcatgtactacagtgaccaggatgcagctgtcatgtgctttatccttgcccttagcgcctggagaagagggcctgtactctagcttcttgagcaagagcccagaatttatatgcagtagttaggggtgtcagtcaactttccaggtaaagtctgtactcttgggcttttgagcacagaacagggctttttgcagctctaatcctggccttgaaagttactattcagttaatatacacagagtgttcctctcactgggtatggagctcagagctcccacctaagggagaccatagagtccactggacaattaaatgcaaagttccttcctatgctattgaggactctgatatcagagaggcatctctcaggacaaccaaaagtgatgctctgccccttcaatgttaatgtcttccaggattttctaacaggcatattaagcaggctgatgcttgggaaatgccaaaacctgcaaggccaggcagcagtgtataactggacagagaagcaagcccctgaacaaagctaggatgactcaactcttcccaagagagaggtatttcttgaagatcccagcaagaaccagggagggatatgatctggactagaagctggccatcctccacctatgtaagactgaggccacaagggagtacagcctgccgctggaaacttatggaaggtgatgtgatgcctggaaaacccaagttgcaccatggcccacccatgcatcgcccacccatgcatcacccaccacatggccctgagctttgggctcagaaggaatagtatggggcagaaacagggatggcctacaggaccactggcttacatgccagaacagactcaaacagtggaagaaacacagacagaggtgccaagatccacctgctcccaagggcatcaccaaaccacaccacaaggcttcattagagacatattcctgcctcaggggctccagagtcagttcagcctttagacaaagcttactgtttgagcctttgtaggctgaagggcaaacaggcaatgacctctgtacctttttcttctctcgtgggcaatctgtgtggacgtgaaaacaatctcatcctgaaagcacttccacaactcacaatctggacttattacattaaataaaccaaatgcccagaaactcagtggctatgttcactctggatccttagccacaaaactatcaacaattaacagctcatggggcctgaaccccaagtgagtctgcgagactgccaattcctgcacttactcagatccccacaagccagggcaccatgtgctccaggtcctagtaaaaacaaactgagctgtttagtgaaatctcccataaactagatctaggaaaaagctgtgccttatttcatccattaaatattagtcacattgacctcttttacagtgagggcagctgttatttctaatgttgacaacagcaataaagcaaattctcaattacacagtgccaatcactctgctgatataggctgaaataggccctgacctctcagcagacatctgggggtgttgtggggtgaggctctcaagcaagcagatgttgatggctccctgggctggaagggatggctagtctgacctccccagtaaggactcagatcagacagtgacctcaaatgtcactctttaaaccctcttacacatctggccagcccagccaaaggctcccaaaggccatttcagtgctggctaaagcaaccacgaaggtaccatggtgtatgtgtgtgtgtgtgtgggggggggatactacatgacaccacaacatgtcatggtaggccttgtactcttattcttggaagaagccatgattggacaagccttcctactaatgtggagtgcccatccaggcaggaggcccaaggtcccacttgtgtacactccacatagttcccttcatgtgtaccctacatagaacaacctcttccctgccaagcaaagccagaggtggaactggagggggtgtgggggtggggcagcactgtcctgctgcttctacagaagtcactagaagttctaattaagcacttctcctatgaggtccagaaatgccccctccctcacaagctggctgcaggagacagagccattctgaaacttgggcaagggaatgagtataccagttccatattcaagtgtacaaaacagaacctgccacctgccaggccttgggctcagtcccttctcttgtctctcctgagctccaaggttgcataatgaagcccatcctcacgagatcatcagcacctcacagacacatgcctaccacagcaactggcaagttctagggcagggcaaaaactccccagattgaattcttactagtgctcttggtaatggctgcttctacttgagattataactaacaacaaaaatactgacaagtgcctcaaaactatcaagttagtcaaagagctttcacacattttctagaaactgaggaaggcaacaacacacttctgtatagaagacaaaacatttaggtgttttcagatgggctgtgaacagcaccaagaccagcagccctaaggagccccacacacgacagcaccaagactgacagtggctctggagccctcaactggtcctcagcttcttctctgcacagagcagaaggattcttgctgtcctctgtgggcccagaacagagaggcccaggggagctgcatcccctgaatcccagagcttacaaaattgtacactcagaaatacttacagtttgctgaggttgtcgagccccatgaaggcaccactggtatcttcaattgtccctgagatctcattatggtccaggtccctgagaagacagaagacaagttcaccctccctcttgagctgtggcttcattcttcactctgtagggagaccaaccccgcacccaggttttcaccaggaggcctaaagcatctaggtgcacaccagagggcccagcattatgtactgccatgataagtgtggccagacaaagtccttttgcatactgtgcagtgtgaccttgcttctgcttccagaaaagctagcacacccatcaaatactctggctggctccagggaggaaaacagtagacacagcaccagcagaagccaggtttgcaccccacctccacaaagcagacttctggctcaaccattcctaatagttcctgcctactcttctattaaccacagtcctctctctgggctcaaccaggatattggaaggcatagggaagaaagggatggcaatgaactaggcctgccctgatgttccttcaggctggcctgtaagtctgggaccggcaccctgctcctcgtgaggcctatgcagcactagactctgagccagagcagacatctggatgctgagtcagtcttgtgacccacttgccaggacaggaaaaataaggccaactcctcggtcccaggctgcctggataaggttagtactaccacttcctccctcagcctctaagaccaggtcacagtgcccagcaacacaccacacctgtcagccagacagacccctactctcacattttttctttgcagatcttcacagggccatggtctctgcacatccctttccagaatccttgcagatatagccaagaacagaaaagggatgcagctcttggctcagagaagaagctgggaagtcactgccagttgggagtggactgggatgcaagtgcagaatgcttgctatgaccttgacttcacagcatgaagctaagaaaatgtgctgcctgccataagggacctccccttcagcgagtcccaccctgtcatctttagactgagtacagcaggggcccaggctgtggctttgtgtgcctgtctccctgctccaggccttgcctgccaaagtctccctctctttctggccagttcagcctgaatgtttctggtctttctgttcaggcctctcaaggactcacagactgaccttggcttcaacagcttggcactagctttcatactccccagcagtgactcacactaaagcccactctgccaggtgtaagtgcagaggccttcctctaggcacatggtaggcgtgctctcctagtggagaccatgctggaaaaggaggctgctgaagatgctcccactgtctgttatgaacctcatgcccttctgggagttttgggcttaaggctgcaaggaatctgcctaatgtttgtaactgagtagttctatgaaaagtcccagaaaagcacccttagcatcttctagatgtatcaactggatactttaaaggacatggcattctcacttcctctttgttacaccactctctaatgagacacaagcaaggacctaagacttcatatctctctctctgtctctctctctgtctctctctctgtctctctttctgtctctctctctgtctctctctctctctcctccctccctccctccctccctccctccctctctccctccccccccctctctctctctctctctctctctctctctctctctctctctctctctctctcggataccagatccactgaagagcttcaagtagcaggaaagtgaccatggaactgacttggagaaagaaatacacagaaggggctggagagatggctcagaggttaagagcactgattgctcttccagaggtcctgagttcaattcccagcaaccacatggtggctcacaactatccgttatgagatctgattccctcttctggtgtgcagatatacatggaagcagaatgttgtatacataataaataaataaaatcttaaaaaaaagaaacaacaacaaaaagaaaaaaaaagaaatacacagaagtcaggcctggggatgtggctcagcaaagagaaaacacctatcattcacacggccctgggtttgatctatagcaacatgagaaaaattctcaaaatttacagccaggctcactcatgtaatcctagtcctttaggggtaaagacagatacaagctcaaggctagcctcagttataagagtttgaaactagcctgggttacaaagatcctgtcttaagaagcaaacgaacaaaagcaccaccctccctgttcaaaaaacaaaaatatataaaaagtcacagccagggttggggatttagctcagcagtacagcacctgcctagcaagtgcagggccctgggtttggtcctcagctccaggaaataaaaaataaaaaaataaaaagtcacagccagaagactggagaagagatgcacaggactgttggatgctgctgcaggtaccctgtgtaggcatgcttttccagacccacacaccctgacctgctaagtatattgagaattacaaatgcttgtaagcttgtaatacttaaagagtccttatccctctataggcaccatcctgggaaagaaaagatttttcttctcaatgttttttttttttttttttagtcaataatatagaagtttgagtccatgttcccatagcacaccagctttgggtccaattctgactagatgccagaaagagggaatctcaagcaaaatccttacaagacccgcagacttttgagtcccttgaaggcgccttcagcgatgtggctgatggcattgtggctaaggcgcaggatactgaggctgctcaactccgccaggctctcctcatccagccgcgtgaggttgttgaaggacagaatcctgaggaagagaagaggaagacaaatttcaccactgagctatatggatgcccgcttctcttttctcgtgagcatcatgccatgactggcctaatctcaccagaaaggggatacttaagcaagtctacaggaatcctgagtaaaagtggccacacagtaagaaacccatcagtcaacattcatctagtctgataactaaatgattatgcagaactactgagaactactgcttacatacactgaagacacctgtcatacaacccaaatctcaaggctccaagcccctccattgctggtcttggtttaggcaatgaaagacccctcttggcagagactgacacagtgaacagaaatctggaagggtacttcacggagcaaggaagccacagctacactctctgcacctgccagcagagggcaccatgagccactgcctggaacagtcaaaccaggacctcctgtcttagcagggttgtgactgccaccccgctcaacagggaccatgcactttgcctctgtgctggaatccccggcgctactgcacagcacagggttggttatgtgacataatagttacctacagttggaaagttaagttggaactaactggttcaaaaagaagcaaaattaattgattgaagattaatgcggatttaaaggtggcagtgaccactattctgtctctcttggagaaataagtcatggtgtctatcaatagcaaagatctggcaggaggccaaaattacatcctcacctgcaattaaggcatttagcttaaaaggaagggtaagagcatactggaaagtaatgctacatctggctaaggttttctaatatggaacaaattactatgactagtgagtgaaccttccttttctctaaagggcacaagagacagtattatattgctaggcagaagcaagcagagggaactcaagggtctgcctaggagtttacctttccatgtggttctaactccaggctcacacactttctggtgtgttccagaggactgtccttacttggggactagactgaatacctacacaaggccttttcctttccaaaactcctagtctccaatagaaaaccacatgccgagggctggtcaaagccactcagtaccgtaggcagtggtcaacagcagcttctctaggtagcaagaagctaacccaaagaataaacactaacacagaatctaaatgcaatgaatacaaagcaagggacaggactatggccttttacaaaaattaagggctagctaacctatgaactctaggtaagtgtggagtatgagagacatatacactgagcatgatattatcaagaatagagtcgaccagaggaaagcacaggctacgagagtcagcatcaggctcaagtgtctatgtatgcctggtgaagcaaaagacagcagagaggctgagtaaggtgtggcattcctacaaatcacttgctttggtggatcaatcttttcctgtagctaagcctaaggtaaaaagaaagaaaaaaaaaaaaactttctgaacctctcaaatataaactattgaactacaaggtatctattaaactgaaagaactcctcgaccaggggcagggacaaaggggcacacaatgtctgctgagtccttggctctggcactatagtttgtcttctctgaggagatgcctaggccacacactcccctccaggggagtctgttgttaccattctcgggagcaagagaacaacctggggaacctgtctgggaacttcccaaaggaccttaaggatgcctcatctccacacatccaccattgggcattgggacacacacaacagggcagaatgaacccagtgtcctgagaaaaggatggtgagatcccaaaactaaacaaatcctcccacggtcagcatgtcaccatctttcggtttcactgtcctattcaaatgtgactttttcactcaagaaatacacatgaactcaaaagcgctgtgatgacaacatctaggcttctgtgccctggcatgtcctctcctcattgctgtctccaagcctaaggcctgggggccactggctgcctgtgtgggtcttccttcctgaacacatcaccaggtgccctgcctctgggcttccttctcatctggaccctgtggggtgagtcaggccagtggttccttgaggtcttgaggcttccctggatactctgagtggccactgccccaggcttacagctcgtgcagcttctgacagaagctccagccatcacgctgaattcgagagatggagttgttgctgaggtgcagctggtgcaggcctgtgaggccatagagggagccgctgtttacttccaccaggctgttgtactccaggtgcctgcagagacgacacacacacacaggatgaagagactggcattccctcatcacagagacaacaaataggaggcagtctgtatcaaagtaattgttagcacagagaaggtaactgaacagagagaagtatgcacattttgttccacattcagtatcagagaagaagtttaagcaaccagaacttgcttttgtacatctgattttctctcactactcaaagcagtgggaagcagaggcaggtggatctctgtgagttctaggccaacctgatctacaaagtgagttccagaacagccaggactgatacagagaaactctatctcggggggtgggggggggagggagagagagagaaagaatcctaagaaacacatcacccctcatttgcatagacttactcaacataaaaaccaactggcaggtaatcagttttcttctgacaactctgatctcagccagtgacatttagatttcagactcccaaatgaacataggaaactgacatccagttcatcggcagtggaaagcgtgaaacagcgagaagaggagcaggaggctcttcctgtgcgcgccatagagagcaggcgtgtacgggaaggggtgggcagtgggagatgcttctgaagagaatgggcaacacactggtgactgtgggcccaggcttctggcctcagttccagctacaaagataacagcagaagtataggctgtgatgtaatttgcatgggaagcagggagtatgggacatggccagctgaaccattgacaggcacaggtaaagacagtggtacagttgtgttcatctggaagaagcccttggcaaacccaagaaccagagaaccaaagacagagatggtaaaaagtgatggccttgtggaaaacacacttggggaggggtgacaccaccttgactgcctggctgtgcagattcaatcaaatgtagaggtttaaaatcagaagatcaataactgcttctctgctgttctttttcactattctggcaacagatagctctgctgctgcacacatctggctggaaattcccctgataaaagctgcacatctgcactcagtgtcttgattagctcacaagacaggaataaatctcccaagatgaactatacattttggtccacctgcacatcaagaaagaccatcgacccagcaggaggaaggaagggacttcctgtaagatgtgggagtggagaggatgtggggagggaatcactctgcaacctcaggtccgtggaggaagtgggggtagagagtaggcccagcagactggtgcagtccatcttccttccacttccttagctgaccacgcatccactaaaaacttgtcttatcttgcagggaaaacaacctgaggtttggtccattgtgcagaaaaaggcccaaagagcagtggcttgggtccacagctagccaccacactcagcccatgcccatgtcctcccagaacccaggacaaatgcctacacttacagcacatgcatcttagacagcccccaaaaggcaccatctgtcagcttgctgatgttgtttcgttgaagcttcagcacctccaagctatcgagcccctggaacgtgagaccctcaatcagccgaatccgattccgattcaggtccctatggagatgaagccatcaggtcagagcatccctcccatgtacacatctcgcctgcaccattcccagaagttcaaacaggtttttgagtcactggggaaactctgggggagtcttcatagggaaaccaaaggttccctcagctgacataccaacacaccactgtcaacagcatggatgatgtagtaagagaagtacagtgaacactgcagagctagctccatgttggccccgataagcaccacatttcttccctgacaacagtcaccactcatgattctacagcaggccctgcgtatgactaaggagatatattcccttagctgaggtgctcagcaataggaattcctaccagatgcttcaatccaagaaaatcttaaccactaggtatcaaatagtatagcaaaccttccaaaactgggggcatctgatagacctccatacaatggagagaagtgactgcttactgagaagtggggggcgggggaggaaacacatacacacttggcccctagtcccaatagaacaaccttagttgaccaagagagaagaggaatctaggtcagctggatcccattagcaactctggggaaggtgggagaacacagcactaattaggaagccttggttttcccccaaatacttctgcagtgtctcatgaccctgcttcacacacagcatcttcagcttgttagactgaaaagaccaagcctagctccagcactcatggggctgagaaaggaggtagcacagaagcaggacaggcacattccacttgtgccagccagacctgcaactgcttcattctgtttagaccaaattttgagtcttagcttattttcctgaaatatactcttctgctaaaaggaagacacataaaaacaaagaaacagagctgaaaaaacctttcactgactggagagtttatgctaatataagttttttttaatagtttaattattttttactttatgtacattggtgttttgcctgcaggtatgtctatatcaaggcatcagatcccctggaacaggagttacagacagctgtgagctgccatgtgggtgctgggaattgaacctgggttctctggaagagcagttagtgctcttaactgctgagccatctctccagccccctaatctaagttttctagcaaccttttgctatttatattatctggaaagacacacaagtccattcttctatacacaaacaaaccagttaaccttctaaagtttagggatgaagaggtggctgcctctgatcaggtgagctttgtaccaaacaattcaggaaggtacagatgcctttgtgttcaatgcccagaaggccccagtaccttaaacctcactaaaaccgctgagataagatggaaactgaggtgggagtagggtgcatgcctgtaatcccagcacttgggaggttgaggcaggaggctcaggagttcagagagggagcgccatcacagcaggagtcagggactgcattcagaggcgcagtgtcagggagacaagcatgcacatgtgagtcttttcctaggccatctgaggcagcctgctgacaccagacccagctcctaatttgcttttattaggtgttgctgtagggtcataaatgatagtttatgcagagctttaccaaggggggtgaggaaggggtggcgattggtacagggtccttggggaaatttggcccccataaagtttggctaaccttaattaaagtgcaggtttctgtactcacagttgtgtcagcctgggtagcttgaatgctttcacaggaagctgggtgatcctgtttttgctcagacgaagagtcagcagcgaccgtgacagaccatcaaatgctccagactccaggctgctgatgcggttgcttgccaagttgctggaatgattcaggagagaaaatgtagtggcagtaggagcccttcttcactccttacagcaccagacccagctgggtctgctaggaaacatgctaaggcacacccagagggacagagctccactgagttgtttatcatctcaaggcttccaagcccatctcaacttgaagacagcgaacctggggatgctggtagcaaactgtctgatgactagaagacactgaggcaggccttgttttggcacacagcacactgtgcttttgctggtgggaacaacactaaccttcacccacagcagctgacagcatgaggcctgcctcacaagaacctgtgggatcccttcaccaccaactaactagtttagactggacagaaaagccctagaagcaaaaagtcaattgggaggcaaggtcagtgggttttacactttgaagaaacggcctttatttaatcctgaggtgggtctgactgtatggtttacataatgaaaatgtgcaacactttcaagaagtacttagaaacctctgtgagttcttcagaaaaaaacgagagatacatcttcacagggctacattcatgcatgtcaagggagcctcctccaaccacacagcaggagactctttctcaaaatacacaacagtatacaactcagatgcaagcagctcacagaacaaattccatcaagtagtaaaaagacaagacagagccacagatacagtcttctcccgagaggccactccacacttctcttcctgccttccccagacaaaagcctaagtgaaaatgcaacagacaagagagaattttcaaccacaatgggttgtgtgccaaaagggagtgaagcacttctgttcccgccatcaggcagcagcccagagcagggcacatgaggactctgcaaatggggctggactgtttgttcttagcactccagattaaagagcaatcggtgtgatgaagacatagcagtcaacagctgccaagtagaaagtgccctctgtatctgtgcaggaaaaggacaatgcaacccagggtagcacttggtggcttctttgtgccacttaggtggtagctggacaccttttgaaagccccctcccagagctttatggaagtcaaggtctcttcttcccaattcttgtgccttgatgaaccactgaaagcaatcactcctccccctgcagtctcagaatgacttggaaaaaatgtgccaagtggcacctttcctgagaagatgggtcacagtgagccctaaagcagccttgcaaatgagctgcagaataactcagaagcagcagcaaggtgggatggaatgcattcataactaggaactgtttctttagctttggtcttcagattcctccagcaagcagtattttcctacctgcagcaagtgcattacataggtttaacttcttcattcctgtctaccatgcactcagtgtgaggcagatactgagacatgttttttgtttgtttgtttgtttgtttgtttggggagttttttgtttttgttttttttttaatagacatctaaaactacaaagttgggtagctgccctctccaaaggagcaagccacagcatggttattcagatggtccctgatgctacaagacatgccctttcaatctatctccctgtgatgtgcacacactcatcacccaaatactccctccaagtttctctgggagacagctccgagcatgagagcaaaactagacttgtaagcaaagagactgggcctgattcctgggctcctacctgagggctgtctcccacctgtgacaccatagagtacagggtttggaaatggtctaaagtgggtgcccaagggatcatgagtagacctcactcttggcctgccaaaggtcaatacaacctcatggacttagccaagccaaggaggagtgaagcaagtaccccttatgtgtctaggactgacccagggcagtcattacaaggcctggaagctgaggtacatggtacatggatgggagagacacttacagctcctttacacgcaggccattcgggaaacaggagcttcggatttccgtgatgttgttcaaactcagatccagcacttctaaggacaggtacgacttcagctggcgcccatccacactgaggatcttgttgtgttgcctgaaatagagcagaggatgaagcaacaaactcttacctttcccactgtttggtttgtgattttacctttacctaaaattacaattcagtggcattaaatatgtgatctgtttctctttctattccattatcatctgctggctcagtgttatatatataggcttttctgtgcagaatagactctctgtccaaatattgtgcctcagctgttccacccaagagaagaacatagggtggtgacatgcccagtgtccagtgacagatgatatgaaaaatgcaccaagctgccccaatccaaccccatctctgatctctggtccttggtcttgcattgtgactaaagactgcaagcaccagagtccagagctcaattgtgttgttttttaaaaaatttatttatttttactttataagtattagtgttttgcctccatgtatgtctgtgagggtgttaagtttcctggaactgtggttacagttgtgagctgccatgagggttctgggaattgaaccctggtcctgtggaagagcagtcggtgctcttgactgctgagccatctctccagccacccaccccttaaagagctcagtttaatccatctgaatacatcataatacaagttacagtcttctgacatgtactgtatgccaggcatgaaaacaaatgggaatgtggagagtacaaaaatgatgatgaccaacctgactctaaaatgagcaggagctcattgctgggcccagctgcaaccaaatccctgaatctctgccactggtgactttgggccttggttgtctcacctgaaggatgaagccacagcctgctccctgaaaccacactaaagcacctggagggcactgtggtgcttaacttcctgctctgacttacttgcacctttaatcctctttctacaaaacccaaaacctaaccaagcagcattaacaactcatctggagagaagcaacagccagcaagggggtgagggctggacattgatgtgggcttgactctgcctgaaggggtcacagtgaagttcgttgggtggtaggtagtgctaggactgcagatcccagccacacactccgccagctatgagtaaacaggggcagctctccaaccaatcaaaagccttctggaacaaaacccaaaagagcctggtgttgcttaccaagtggcatctcctttaaacaaacacttgaccaaatcagttccaacaggcataaacaaggacctctttcccagaagctctgggactcccaggctcctttgttctcttcacaagtctcccaggccctgaaactcaaaatgcatttgcacaactgtgctgagggagagtcaaactttacctctctaggcccctccccaagctacttcctgagttcttcattaatgtctttaataaaggcagtctcttcagttttctgattccaaaaggaaaatagaagctttattatgtaaagtatgggaagaaaaagaacaagaaataaaggccacagcactgggcctcatccgggaactctgaatacagtaccagggagccaggaacagaggacctgggcagagaaaggacgggcttcacacaaagaatctggcactctgaggcctgacacaagcaagccctgggacacagtctagcctctctcctctcccccagacctcctctctgtctcctctgtctttgtcttttgtcttacacttttttcttctttcttggcagtatatttatccactgaaccacattctaggcccccattctggataaatgccactgtgaagaagacaagacattttcacacagtaggaaaagttccccactgagcagagaaggcagccatggagatgcagacattgtgggagtgaggcatgaactctgggaaagaggagtcaggaagaagttgccaggaaaggcctgagaggaggactgagacaggaagagccaagtggggagataaggagctgggtcagacttaggagcaggcctgttgggcgaaccaaaccaggaagccaagtgagtggggttgccaccagaaacaggaactagagaattagaagaggagcctcaggagccaggcaccacaccaagagaagcaggtgagccacctgcagtcagttcccagcccagtagcctaacaagacaattgggtaactagtggagcaggggaagacacctgcaaaccaagcttgggaactcagaatagggccaacttgcagattctgctggtcctacgcctgcagatttaagcaaatgcattcacacaagatactcagggggaaaaaatcagacctgcactgagcatgtgcaaactttcctttcatcatccccaaaacaacagtaagacaatgacttacaaagtacttgcactgtcttggctattaaacgtaaatcagagttaacttcaagtactatacacaggtacatgcaaaaactgcactgttttacattcagggtttgggtatctataaagaaccactaagattctacacaaaacatgctgattaaaatatcagcaaagggggcagaagggactcagacctcttccagagaacctgagttcagttctcagcacctatgtcaggttgctctcacaacagcctgtaatagaagctccaacgggatctaataccatttctggcctctacagccactctgagacatggaatacagtcaacaaacgcacacacctacacacaaagaaaagagaactaatgttttcaatcagcagaggacttaaataaacattctccaaaaaggacacacaaatggccaacaggaatcagtattttcaagggacataagtcaaaattaggatagctactagcagaagaacacatgtgcatgagaatgtggagacagactatggcaagcagtggggaagtgaagggtgctttaggaaacagtatgaccatctaaaaattagcacaggaccactaccttttaacaacccccgaacagaaggcagctctcaagaggatactttcgtgtgtccacagaagtgttattcagaatattcaaaagatgaggcaacccaaatgtccagtggcaggtgaatagatgaggagaatgtgatgtaaactgcagctgcctaaactatgtgtatcacctcacacgggatcacataactgaattatggagggtgtaaaagtttggtaatagatttctgaatgcacaacgacaaaacattgattcaaaactgaaggtgcaacgaagccatgatgtctctaacggtgcttgcccatggtgtatcacacagcttcactgcagcctaggttctgaacattacagtgcctgtgctgtgcgtgttcacatgcacagaaacccaacagctcacattcaaaacaactgtcaattacaactccagtgttttactgtactgttaacagatattcctaagaagtgctccaaaataatgtatgacttattgtcagtaaatgcctcatttatgtatctattttatacacgcagtacacaaacatttaatgcccaccactatgcaagttttctgttcttatagaaacataatcattcaattctaaaaaacaaagacttaaattttcctgtcactactgagcatgtatcaaattagcatatctctgaataatattcaaatgctacattttttaattgtttcagttgctgacttcagtttcatacacgcacaaaaattgtttagtgaattttggtttaaattaagatagaatttctaacaatttgtgcatggacctaaatttacttctaccatttcatacaagatacacaaaatggcattcttagcactaacaattgtaaattttaaaaatgatttatttgtgtgtatgcacatgtacatatgtggtggaggtatgcaagcctgtgcatgcgaacagacctgaagggagcactgcatctctcagagctggagttacaggtgtttgcaggatgctgagcattacatgggcacaaggatctaagagctgaccctggctctgaccctgaccctaaaccctaaccctaaccctgagaactactagtttgaggccaggctcaactgtacagcaatttctagagacttctaggtaccctgggctacatgatgagaactgaaaaaaaaaaaaaaaaaaaggagggagggcacacagccactaaaaaataaaatacaaatatggttgcaaagtcaggagctttttaaaaagcagacaatgaagactggttggtaatggccatggagttttagtattgcaagatagaaaatggctcaagaggggttgtacaacaataacaaaaactactagattaactgctgaatattttttaatatatattttatcacaattttaaaacaaaacaaagtaattcttgcttcatgagaccttgctgaaaacaaatgactgtagtctatcacttacggtctccaaggcacagttatctgtcacaggcctgcctaacctactcctccacttcacatgctctgccccatgtctttcctcacactgggcaggccacaggaccctgtacttcttgctcctattgcctggatgctgcttctccagagacccacttgtctcatcccttactccctgtctttattcaagggtcacctcctggtcaggcctttcctggttattctgtctactacgtacccacatcacctgccctacccttctctatgctctaattgttatctggtaaactgggtgcttgcttatctagttcaccatctttcccactgtggcatggtgccatgaagaaagacacgcctcgactcccaactccctctaggcactagaagggtataagttgcaggacaggtgctcagtaaggtcaccaatagtgaatgcagctacattttcaaagggtctaagggtgagcacacaaataggattcatcggcactcttgcagcagaaactgcccaagcaaagagcttcaggcacaatcaacaggagcaggaaggagtttgccatggcacagatcttgtgacagtcctgcccagatgccaacacctgtatcatgtccaaagcagcccagctgctgagaacacacaacatattctctctggagcttcatctctgctgtcagctacaatctgggccccaagtaacccttcctgaacccacacccaagttcagagcatggctgttgaagttttgattctgcagtactctgcaccctccttgacaatccatgtgtatgaatcctgacacctccacactagaaggggcacccttgctctgaaacatgcctgatgttacccaagtccacaacccagtggtgccattaggtgttaatcttaaagagtcccatttgtaaagtaaaatatgaagttcctataactaagggctgatatggcctgacatttaccagcagttgctcataaaaatcgagtccttgttttattagtcaccctgtatcctcagaagcaagctatggatctagttcataggaaatgctttgaaaaaaaaaaagtgagagaacaatgaatggatgactggttcccttcaattcctttgcaacatttcaatgcaaacaggcaagcctggctcccctctcaggaacaaaggactgagtcagagctctcagctccacttaggaaccaggcctgcttcagctgcagaatgccgtccccagctgctggaacaaccaagctgtctttgggagccagacttcaaagcaaatccaagactgacctccaaccagctggggtagatccccttctcacttccacaacaagctcatatccttgacccataagaaccaaaaacctcgaaacccatttcttattggtggctggccctcccttctagaacctctccacccttccttaagtatagagaaaaatggccagcattcagatcacacaggaaagccatcccacctcctcctgaaagcagaggacctgtaaaacccaactcaggacagcatactgcttcacaaaactctctattctttttatttgtttgagagtctcagaggccaggtcaggaaacattctgttcttaatgaatattcaaacaagtcattttccatcactgttaacctcagcgctcacttccctagtaggtccacattcatctctaagttcttaaccatagctgatcaattgctgcatgttacgcggttagtcctgggcaaaacaatgaaaccaaacagcaacctgatcaggtaactatgactaccatttcttcttagatggttcaaagcaatgaactcagagctctgctggaacttaattgactgaggtcacagctaagatgcaaaaggagctgagaggcaaacccagaagaacttgagttttggcttggcccactcaagaggttctcccagcaagttctatttcttgatcaaccctgatgggtctgtgtaaactagccttcaccaggtggcccagcctacaccctaactgcacaaggttctacacgaatagcatgtggtacagggcctgtgggaccaagcctcggcaaccatggcagatggaagcaaaggcctcacaatggagagaaagagtggatccccagagaccaccttctcacagctgccgtcagaggactacatccatctcctcatggggtgggtgatgctgcaaaaggacacacttaagtttacagaaggcaaggacagtgcaagtcaggggacagcactgtgctaggaataatgtcaatggcctcatcaaaggaacactcacaaagccaatgattctgcagccaggaatttcggggagcgggtggtggcagcctagtcacatggcacttacttccaactagtgtcagtttacccccggggctgccctctggggtaaggaaaagttaatacagcagaagtctattaaagcaacacctgttaaaggcttcaaaaataatatcagtcttcaaaggaggagggtaggcatgataagctctcgccacttggctacattttcagagctaatgttaaattagacagtaaaacagacggaggcatgcgaaaccaacacttaagacttttatcatgaatgtttgttccactacaccctgtgaaagcctggctcaccagatccccttagtagtgggaaagatcttatgtcacggatcacagccgggaggaaagggtgagtggatcaaaggcacagggacatgttaggttgagtggaaatttctggttcctgaaattatgcacctattgtctttaacagcaaacttattctataataggccaggtggtgagtaacttaagtttcgtgggccatctggtctttgtcaccactactcaaattctacttctatagtgttcaagcagcatagacaatacacaatcagcatgcttctgttccactaaaacctgacttacagaaaccattggtagccacacgatattatttgccaccttggtagcagggcaatcagctttggttttaggagaggctctaaagctaggtctgctacagttttgaaactgtgtgtcaatctggtttatcaacctgcaagattgggctaaacatccctctgcagagacacccttcctttcttcctctgcccaggtcactattagacatcaccattgcactctttactgcctatgtcttgtctagctcttcagaaagtaaagtgaaacctaaattgccagctttgtatgttcctcaaagatgacccacgttacatcttggagccagtggaaagagacaggacaaagaggctgccatagagaatacaaagccaccctgcagctttcctctataattctcccagctattctgaagcagactgaaggtagccaactcaccagtcctcacatccaatcatggatgacctttagtccattccttgactgtggatgcttaacaagaaatacaaaatcttccataattttaaaccaccgagttagcaaaatccaaattacagcactttgcttgaacctctaaagaaaacagttttaaacaatctagacctgaccaggaaaaaactgtaacatacctaacatacctctggctctctcacctccagcccaccatccccacagtgatcctgggagacagttaataaaaccctccaccagggcagctctgactacttagagcactttgcacaccgaagccttgctctggaattctgatactgtcaggtagcaaacagctcagtgctcacacacagcaggcattcaaagtctggtcagaacaactgaaggcagccacccatccataggtgctgtgggaaactacagggtaacttaacacatcatacatgtaactggcacaatgtgagacaactggagacccatcagcactgagggtaaaactcagtgcagcactgagtggccctcgtgctacttagggaggtatttgcaccaaagccatcatgcagatgatgagttcaaaacagggtgcccctgggcaggtcacatgatactagcagctatttatattcgtaaacatttttacaatataaaagccaaactgagacttttatgcataaattatacatgcagaggtcagtgtatttttatataaggtatacatacaacccacatgagcatcactcagatcaagacagaaaactgccacttcccaatctcttagctgttattcttctcaaaccaaacctaaaatttcttccaaccatgaataattgtgcctattttaatgctttatgtacactaaattattccacataaacgcttctatatctgtctactttcactcacattttgagatccattcagactgttcttttctagtcgcagtgtgcttgcatgcatgtctttgtgtgtgtgtgtgtgtgtgtgtgtgtgtgtgtgtgtgtgtgtgtgtgtgtgtgtgtgtgtgtgtgtgtgtgttacagagtctgggtatgtagccctggctggtactactctcacctaaagcttgagcctccatctgccctcttgggatgccatctcaacttcagcatgttatttttattgaagaaatacacagagatttgttttctcattccacgttttaagcagcactggggtgcttccagctgagactattgtgaaaatcataaccatgaacatgagtcttctgaacatgcttgttggtgcagatctgtgtgctctctggtaggcatgcaagggctggtcatcaggggtgcacatctcctgtctcacactgacactggtagcttttgtttagactaaactctccaaggttgaaatgaagaggaatggtttgttctgagtgcccatttcatgcccttttattcagaagtcacaccttgcccaccttccccatgcctgcatctctcagtaaaatgtattacaagggccagtgagatggctcagtggattaagatactagctgtcaagcctaacaacctaaattcaatccctaggacctacatggtggaagtaactactaaacattagctcctgaatgataatatctatctctaagtgtaaaaaatatatatattaggaatatagctcaaggccacacaatttaatgatcttgtttagctgttacttagatgaggccctaataagcacaaagtgatgacagcgagggtaaggtataaattggcaagaatagtgtcaagataaaggcccatatgcatcctgaatgtgcggcccaggagagacttaaaccaggtgagcacagaaaaccttgacaggccaacctagagaaaaggtcaacatgacaagcagaaatattgatgccccacctgcctggtttataaccatcttcctaaagtgaaaaacaaaaccatctgtcccattgtacagactgacaacctgcttgaagacactggtgccttgtaagacagcccagcccagatgatccagtgggcaggaagtgagaatcggcataagcagatctcttgctcactgactctctccttccctgctgctagtgaatcacccgttccctggggaattttggcagattctcagcctggctgcagatgacgttcaggatctgtttattcaggtggagattggataaaaaacaagagcagcccagtggcaggataaacagcctccaccaggcagggtcaactctcctaaggcagggctgggctgtgtcaaccaagctcccagccggctcacttccttcaggatcactgaccccctccccttgggggtcttcaacagacagtttccattaactatctgaaaaagaaatctgatgcctcaagcccatgagaatgtatgtctcagggaccctgctgcagcaggcctaccattggcatacaagtattgaactagaagctccaggcttgcaatgaaggaacttagggataatcaagcagcagccagcactaagtctacagtgacctagcccagggagaattggttcatgaagacacagtccaaactgtcagattattgctgtttcatagaaagattcacaaaaaaaaagtaacaaagaaatgccctgaggaaaatatacattgctgggtgaaaagggcccatatgaaaaggcttactaatacacacatctgaaggagaatactctgagaaattctgagaaaataaaaacactgagacagcaagatacagtagttgtcaagaaggaaggaagaaagacagggaggaaggtgggataggtaacattagagtctccggtagtcattgcacatttttcaaaccaagagaatttccaataccaagagtgaaacctaacatagactacacactttatttagggataatgtagcaatgttggttcatgaagtataaacaatgaaccacagtaagacaagggaatcaaacactggggtaagtggggtgggggaggcactacaggaatgctctgtactttacagttatcctccaaaccttcaactgctctaaaagtatattaattaaaaataaaatctcgccgggcgtcggtggcacacgcctttaatcccagcacttgggaggcagaggcaggtggatctctgtgagttcgaggccagcctggactccagatcgagtgtcaggataggctccaaaactacacagggaaaccctgtcttgaaaaataaataaataaataataaataaataaataaataaataaataaataaaatctcagccaggtgattataggcttgtgcctataatcccagcaactcagaagacaatgcagaagactgagcttgaagcagccaaatactgcaaagtgagaccctgtctcaaatctctgccaccacctaaaaaagtctcctggagtattttgcagtcctgaggtacagcacatgtaaggtacacactggctgggcgttttcacttctttccttaatgctaatgctcagtacccagaaaaacccttagaatacacaagtttctcttgagcaaacaagtgaattacaactctagcttaacctcttgacaattacataaaagaaaaacaaaggtaaaaccataaaacttaaatttttttaacaaagaaaaggaattaaaagcaaagcagagaatttactttcttttccagataaggaacctacagacaattttaaagaaagcagtggggaaaagtaagtttctgagttacttactcctttccagtattcattgagctccaaacactgagattcatggatgagtccaagttagcaagggtgagacactgatagatcaagaaaggctggacagtaagcagagagtcacctgagtgtcatctgaacaatgcctctccactccctcaggagagttcctatcagatgccactgaccagtgtgatctaaaagctacatctgccttcaaccctcaggacacacgctgagtcccgcccccaccccccaacactgatggcctggacttccttccatacctgcaggaatggaatttgtcctggcatcttggcagggcaatatggcaccaactggaatcaggagacagaaatcaaggcaagacagtcacttccatcagaatttccatctatacacagacatcttaaatgcttaaacgataagcatcttaagtgcttattgttcatggtcaaggccaccatggccaccagatgctctctcagctttatctgcccccaaattgttttccttgtttccaatctgagccacctgcacctgctaccgacagaccccagcacacccatggtgctcctctgctcatcattccctgccactaaacctcagcccacatgttcctgcaatttagcagagcaccatacagtcaagcctctagtcctggctcaaccacacagccaggggtactgtaaggctggcctggcctttcctgactaacagtaaacaagcttaaggccagcctcttacacagtcaaggccatggtccatgcctgtagggaagaaaactacacagaacaatgaggattctcccagcccccgggacctgtgcagctgtctctagaccacaaaatggacaaagccagacagcactcatgttactgcccagtcctttgccccagcagtgtactaaatgtatttttcttcctcctagatgaggggagggagggaaggagagagggagggaaggaaggaaggaaaaagcagatggcagttgctaaaacaagataggaaagggatctagtgaggtcagcaacaaaccctagctgctctgagcaaggagctataaggagtaagtctttctgcactagggggctgtacccagcaagggttcccatgaaagagaccactcacaaatgctggtttttgaggcgagcactaaggagcccaaaaaccaatgggccctgtcaccaatgcttgtggtccttcttcctagtgacctcaccatccaggaccagaacagatgaaaccgaatgaaaaacaacatggtgacctcaatcctcattccctatggaacacagcctccctagtatgggccacacttcatgtcaacctttggtatcagggatacccaggaggatgtccatcccatgtggtaagccaaaaggcaggatacatgttatcactgtgcatgactagtattctaaaagtcctacacagagcaaagtagggagaagctctcacccagagcctgacagcaaccaaatcttcacacttactattgtacacaatatcaatgcacttgccagttatgtaaataagcttatttaaaaaaacaacatgaatttagatgctgagctttggcacctaatctttttaaaaattcttttcttagattttatttattttcatgtatctaactgtttttcctgaatatatgtattgcagtacctgtgaagcacagaagaggacatcagacctcctggtactgtagttacagttgttaactgtaatgtaggtgctggaaattgaaccttggtcctctggaagaacagacacttctcttaaccctgagccatccctccagcctcttgggacccaatctttaactggaaatgcctaggtaaagaatatgtatagggcatggcattcactgctttactgcctgtgcaccaggcacggatgaagatttgggttgctgaggtctggagccctgtaccgtaacagtctcacagcatgtgaacccactccaggtggtagacactttaaaggttcattccagccagaacctggatgaaattcactggagtttgcccacaaccaggctcacctcccattttgcctttacacaggaagccagcacatgaatcccagtctcagcgatgtggaatggcctcatgatagaggtgggtagtagtcagactcttgaggaagagatcatcactggacagaacccaggactcccaccagggagaagcatcctctgtgctgggccaccatgtaatcagaacagtggtagggcctgtctatacagatgttgaggaagtaagtgaagctaggagacactgtctgtcccccgccccaccccagtctcctaatggtgacccacacacctgtaaggagcttcccaggcctttagcctacaagctacaaacacattgttgctctagggcaccagacctcctctatagacattgaacatgactgaggtggtcagcttccccatgtctacatagatcaggggtgggggtgcctttcatttcctaggcagaaagtatgatggcaaagacacattctccaaggagaagctttctaccctctgctcccaaccatgccagacaaagtttatccatatcctaactcaccgttataccctggctggaaatcatccagccaacaagagtgtaagcccaggtgttctcagactcctagctgtgctgtcctgtgagcagcacaggcagttaggttacacagtcagtggctaagagaacagagagggattgatgggaccaggatgtcctggaaatgtcttcaggggccaccaaagggccgcctgtcttcacctgccacttgaacattcccctagatccacatgccagctttgaaacagccctcagttccaggctgaggaggaagctgtttcagcatttggctgcagcctctaagacaaagtcctttccctccggggagtcataccatgatgtgcctttttaaaaataaaatcaggcctgtttcctgcctcatctggaagacttttgatctgatcatatgatttagactatctcttaccacgcaatttcccaagccttttagcatacgaactaagtgcacttggaaaactaggattaagagttgggctttaatggtatcctccttttccatcccatagatgacaagactgccacagcatcaaagtggcaccatagtcagcaccactgttccccaaaccaccagtcccccatccagtttgctcctcattcccacaagagcaagcacttgctgtttcttccttggaaacacaaacttttaaagcatgtcattgtggatgtaaaagcaaaaggcaaacctgaaaaaacatacagcagaaaatcttttagcttagagctaggcaaattcttagacttgagcctaaaaagcacactccataaggtaagaaactaatgcactggactaaactatccccaagtttaaggtatttataatgtgaacaagtttgttaaataaaacaccagattaggtgaatatgttttcaaagcacacatccaaaaacaaaacagtatctagaatcttatagaacacaaataccaagaagtaaaacaaaataattagtttgaaaacttgacaataagtaagacaatatttcagtaaaaaggctcacagataagctggtcactaggacacacacctatgaggaatgaggcctcaaagccagcctgggctgcacagccagatcctgtatcaaaaacagcaaaaatgaaataacccacaggcagcaaataaggcagaagaaaatgttgaacatcaatgaccaccaccagaaaaatgtaaatttaaatcacaataaaatataccaacatatctaagtacttatcagaatggccaaagaactaaaaaatggaaatatgccaccaaatactaaccaaaaaaaaagatagggttattcatatattgctaacagaaatataaattagtacagccattctggaagagtccagcagtttcttaaaaatcaaaatatgggcagactgacctggaactagagccctcacccagtggctgatggaaacagagacagacatccacagatatacaatgagccgaaatcgggaatttagttgaagagagggaggaatgaagaacgaaggggtctgtactaggatggaannnnnnnnnnnnnnnnnnnnnnnnnnnnnnnnnnnnnnnnnnnnnnnnnnnnnnnnnnnnnnnnnnnnnnnnnnnnnnnnnnnnnnnnnnnnnnnnnnnncctctggtagtggattagtatttttccctggtgcaagaagggactttgagagcccatcccatatgaagggttacactctggccctggacacatggggaagggcccaggatcagcataggaagacttggtggactttgctgagctcccgttgagggccctaccctgcctggggagtagtgggtggatggggttggggggggtgggctgggtgtgggggagaaagtttgggggtgaggggagggagagggagaagggacttgaaataagcttgttccctaactagaactaataaaataaaataaaatttaaaaaaaaatcaaaatatgaaatgccatgcaacttttccactgcactttgaggcatttacccgagagaaatgaagatttatattcacacaaaaatctgtacatgaatggtcacagcaactttattcaaaacaatcaagaattggaaaaaccacaggagcccctcaatgggtgaaaagttagacaaagtatgatacagccacaccatggaatacagcctgctaacagaatgaaacaaagtaccagcacacaactaaaccaacctccagagaattacactcaacagaaatgaccagtcccagcagagtgtgctatactgctccatttctgcaacactttcaatgaaaaaaagaaaaagtataaatttggagaggaatggcaatccagtgtggagcaggaaggacgtgggtgtgacaatataggagggactttagtgtgtatgggtatgttctgggtcttgcctgtatcaatatcaatatcctgggtgtaaagttttacaagactgagccactgaggaaactgaacgaaagatattcagggaatttctatttctcacagccacttgtcaatcaacaattaccccaaagtaaaaagtataacaaaaccaaaaatgccagaagtcgcagctgacagaaggcctggtagagtgagagcgctatactccacagctcccaaaaaaagaatataccagaaagccaagaatgaacacagcaggccgtgcatgcacagacacatacatacatacatacatacatacatacatacatacatacatacacacacacacacacacacacacacacacacacacacacacacacacacctacctgcgaactccaagtttttaagagatcatccagaaggaatatctgcaaatgagatcaactttggggcagacagactatctgacaccaggacacctatttgggataaaggaaaccaataccccaaagcacacagcatcaaggtaagagccatgtcaccctgaccctggagctacatgtgacagtatgaagcaaggagatccaatttacctccatcacagagtcatatggttcaaaagtacttcccagcagccctccccaggacagtatcttttcatcttccctaggctatgtaccaacacagctgagcagacactggtagcattagagagaacaggccctggatgctacggtgctgcagcctccccacactcactttcagcacccagttaagttgggaagagaaaccacaaattggcacctttgcctcagctgtttgggtttgaaatgcatccaggaagtgaggaaatggcataggaatctgccctagagtgatgtcttcaagggcatgtcccattatgggcaattctgctggcattaccacaaaagaggctggggctctgcagaggcctggcagcaagatagtttccctgcatgtgtctacctcttaggaggtagacagccataacctctcagaacaaacagctctgggagaggatggggaggaccagcctgaactgcaggcacaggaagcctttccctctaactcttaatgagattgacaccaccagctgctccagtgagctcacctgagaccaacacgatgcttgtaaagcaaatccatgtacaaataagctggacgttacctgggcagaagcatcttgccccacactctgagatgccccacacccaacatatatgtcagctctgaacttgacgaagtcctcttaggctcccagaccacatcattccagaacaaagtggacaaccagctttagcggcagggggtgggggtggagggatcaggacccatctgtcactctgcaacctctgggatgacactcgcagtctctgtacctttggcatgtcacagactacagaactgtacctcggaggcacacaggacaatgcctacatacaccaaatctgcgttcactgtttcatatctaaaagggtggaaggataagataacatctgttcattttgtaaccacaaaaatatccatttcatatgcctgtcaatataatgattaactagcccatctttaaaactgtgaaccattgcacaaatgggttgaatcagttatttcccatatactgcccaacaatgacaggccttatgaaagaaaggcctggcatacacacaaacacatttcttccacttgggccagaacagctgaaaatggctcccaggtgtgagcagacacaatagaccctgccttctttgcaaggtcatcctgcaggtcaaagtcaagccagccattttcggattaggtgcatgtgcacaagaggcttccccaagtgctaactggattacagaagccacctgcaggaagtgaggaggggaggaggggagaaggaaatggcccagttggaatgagtctgttgatatgggcaggagccagcccctttcacacgggaggttgtgcaaccagagcagctctgcttccaagctgcatttcacagagccctggagggtgttcagagcccactgctggaaggagtggctcctccctccaagtctttcctggtttctcaagcatcaggagcagcctgtattcccactggatcctgtgctatattgagagagagtgagagagagagaggaagggagggagggagggagggagggagggagggaggagaccaccacccagacatctaacaaaagccaacactcagcagtacaacttcagctgctgagttcccaaaaaggcaggaacctccatgaccaagttggtattccacaagtgctcccctgcctgggctcccccagctctgcagctggtgttccttcactttctcagcaaataacttgcagatgtacctctcatctccctggcttaccactcccactctcaaagagcaaggaggggagaaagaaggaaaaggaccagtcatgacggtgtgatttggcaggctctctaggaggccacatcggctcctttcccagagaaaagctcactgcaactgagggcaaaaggacatctgtgctgcagaatccccaggaaactgctggggcacaggctactctctttgtaaagtgggattttctatcctgaggctcagtggtggtacccagcatccgatgagtctgcagttctgagaccacaggtcctttttggcctttcagcagaaatttgctggcttgccgaacagcctgtctgataaccaaaaaaaaaaaaaaaaaaaaaaaaaaagaagacgacaaaaaggcacatgaccctaaatagagctagtcatgtctgttagtccagctagtacccccgaatggtacagggtctcactgtgctggctgaacagtggtaaattatacccacttcaaggaggagggaaaacggaagtctaatattagagacgtggatcagagtccacagggtacccactgagatttccaaattcctgagtcctagaacaaaggattacaacagaaacacatggacagtaatagaaacaggaacagtgtattaaggaagagaaaggcattcccaagaatgggaatggaacagacagctgggaaaggactgagacttttgtcaaagcatcctgccctaagcctggtgaccttttgcaggtcatttccatcacacccaccttctcttgaagactttgtaggcttttgcttgaacttttgtttctgccaactgacttcttcactatgccatactttctactgccgtaacctcgggtaaattgtcactttatctgagagtcttttgtgtcacccatccatcagcaacaggaagggacctaagacagtgctcagcccttgtacggtgattatctgtccatccttctgtgcagccagatggagttccttaagagaagatgatctagacccgttattactgagtttctcctgggcccctcctaggagcctcacagcaggcatggcagccttaatgtacaaccctgaagtccatcacaaaccagcctgtgccctactgcttttcttttgttaaaacctgaaaactgcaaggagaaagaccaaatccatgaatgactaattaaagcaagatttattttagaggtgcacctgggactggccagctggctgtctcaccctaagtctggacttttagagagcaaccctggatgtgagaaagacaagttttttatagcttgggggtcgggggtttacaaatgggggatttggtgggcaaaataggcagggtcatatgcatagcaagttagttataacaacctcctaaaacaaagacatgactgcaaggtggctgtaacaacagatagtcctaacaacccttttgaaacaaaggtagggttgcaggatgggaaagcagtcagaaattgaagggttgtgcacaatgcaaggctgggaatagacaagagagggacctactggagcaagaagagaattgcacacttctccaacaccactttttaacttccacatgaaacaacgaagtgctcttcaagacttaggtaaggacaagcatctagcagatactactaactgataatcagcagtaaggtaagtggtattaaaactaactcttgccctggggggcaagctacaacagtcaccagtgtgctaatgttcaggtggcagtgtgtctcctgccaggttgggctgtgcaagagcactccttgtctccttccctccctagtaacatgaaaagacacctggagagccccaagtaggtcaccaataaaaaaaaaaaaaaaaaaggctcagcagcaacaaactggtaacagccatgagactcaagcatgctcagtctatccatggcacttatgcttattgtctcctgccactcaactttgagtaatgactgcttggagcccaatattcctggcaggtacctgtcaccacataggtgatatcaagtccaatgggcttgggaaggatacatgaaccctagggcttctctcccacatctcatataaacccagacagtggtgctccatggcaggacagcagcatctgggatggcataaaataactgtcttatcccatacagaactgttgaatcagaacaggacggccagctttcaacacacttgatcatctttcttctctcgatgactggcagatggtataccaacaagaagagcagctacagccacctcaacttgcatacccccacaatgttcaatttctacaacagtaaaaatgagcccaccatctgacaataaccgtcagcttttaaatatgaccattatttcatccttcctgggataaacaccgtgtgctaaaaaaggtttttgttttgttttacatttttacatcaactctttaatatgtcttctagtactggcctttcaggggatatactcacagcaagtttgaaagatagctaaggaaaaacaaaagcaagagcctcgcctactcttgcctctcggctgaggggtaaacactcctgtcccaaagcacacacaccacttcaatattagcatcggcgttctacatccaacaaagttacacctgtgaccttgaactacaatctgtctctaaaaacataatacacagcaaaaaaaaaaaaaatggaaggaaggaaggaaggaaggaaggaaggaaggaaggaaggaaggaaggaaggaaggaaggaaggaagggaaagatatcagcaaccaattaccactaccacacagtatacatttgcctgtatttcaagcctaatttctgatggtctgagctcaggtcctgaagccaggaatcatttccaaagttgcatgaaattcctgtatccctggtttttggtacgtgcttatggagggtagggaagtagagtatttgcggatcacagctctctcccctttaagatttgcttttcagttccactttcattattaactaatttctgcactggctgctcttccagaggatctggatttgattccagtacctccatggcagctcacaaccacctgtaactccagttccaagtgaagtagtgccatcttctggcttctgtgggcaccaggcacgcacacagtgcaggacataaaaaccatacaagtgaactaaaataataattaaaaaaaagtgtaagagaagtatttctaagcaacaacgtaattttaaatagcagaattacaaagtcagaaacaattgtgtgtaactaactgctgctcaggtgccctgcctgtctagggcacaggttgagaagagcaaagggcttggcatagtgacaaataaggtgtgagatgttccacacctggagagtaaggcagccccccacccccaagcatcacatggaagtatgctgcagctgccagaagacacggagtcaaagcccacttcactcagcaatgctccctggtctgaaagacggaccaccctcactgttcagtggtccaagtacagcaatgctggaggaaaagcacaaaccttccacaacagaaataatgtggatttgtcagacaacactactattgccatgagaatcaaaaggcgagtttcctgaactttcaaaacaatttttctttttatatcttgaacgtaaaaatctgctggcagattctgttcctttttaattaaagtctgtttctttttctgagatccatttttatgaaatgagctccctcactccaacccaatcctattaaaaagctttccttgggttttcatgccttctgttattaaggacaaatggtttcagcattatccttaataacactaatgcaaagcaacctgttctttgacaaatactttaactgaatcagatccctctgatcagaaagcattaaccaatagaagttgtgctagatgataccagctccggaaactcttaaactctttttttttttttttttttttttttttgatgccccgatagtaaacaaaagcacaaaactgaaccttttccatgaggccttcccaacggtgacacctagagagaaggaactgtgatctgaaaaggagtcctgagtaagatagggacactttaaggctggtatccagaatggcaggtgtctgcactgaaaatcacaaactttctacttaaggtctcaagtaacaacagcagttcaagcagagggggtaaatgtttttttttttttttgtgtgtgatattgccttctcaaattctatgtaacagaaggaagaaagtaagagtgagcagatactttttaccgtgtttcaattcccacattcaacaagagaaaagaaaaagcaatctgtctcagggccacacctgtgtcaatgacaatgagagacatgcatacatctggcccctgctttcccttgacatgtttattgagaaatttaccccaagaatgctgcccaagcttccgtaactcacatggccccagcagaaatatattctattccacggatcttccatctattcaaaagaggtagacataatggtactactcccaatcctgaggcaggggaattcaagttcatggacttcctaatccaccctcatttggcacccaacaagtatacctggatggtcatttgcctcgcatatctaaggccctgagtttaatccccagtaatacaaaaattatgtagctaagggaaagaatttcgaggtaaggactagagtgtctctgaatggccatatcttcatggacatcatctaggtaaagcaaaggaggcacccactaagtctttacagaaccctgacacctttcagttgtgcagtcctgaaacccagcagaggttaagaaagcatgctgctccaagtctgaatgacgtgcagtgacttccctgcctgttctcatcaggaggggaccttgggcccgtctgctcatctgctggtagcaaaatgccctctaaccgtgctccccagactgctaactaaacttctgcagggaccagaaatacagtttgggaacagagaagatgaagactcttcacttcaacttatggtttcagagaaattactgcccaagtcagatggggacaagagtaaaccaatgaggtggctgccaacatgaacctgcgttttccaaactgaatcacaacagaaagtgaggcttttttttcttctttacatatttcaacatagtgtaatggaagtagaggaacagagccaaacagcctcattgctccctggcactagtgccaaagaatagaaacaagatttttagttagtagagcaaggcaaagttcagagagccaggggcccagggtctatgtcagggggccccctcccactggaataggtggctcagaattacctgtaagggaattttcatccagtctcagttctatcactgtcttgtaactaagaagacttttggggagctactcctccctggcttcctccccaagtaaggagcaagcagaatgaaaccagcacttcttgtactccagtgagtggacaagtggccttgttaaatacggactgtgatgggtgtggcttgaggttctgcactctagcatgcctggaactgacaggaactgctagtcagaaacctgggtttccagaagttacacgcatcttcaagtgctgtgcttcatggacacacaggggactatcacatccctaattagcttcacataaggctaactgacctaatttaccagcaattaaacactctgcagatgctgtgcacaaaggccaagtgaatacaaaaataaaaaaaaaaaaaaacagacctttgcccatctaaaagggatacagctttccccaaagcacctcacagaacaagggttgattcacaaatcttatggtcctaaaagtgagagctcaccaagttccacagagctgtgaccagccaccagccagaagcagtggccatgaattcacatctcatgggataacaaacgttttatgttcattccactctctgttagtcctggccttgctcatgaggaatgtgtaaaggataaggaacacattttgtaaatgacggaaaagaggttctaggagggcaagtcatttttccaggacacagagagtgagtcacaattctactccccgggctctcctgcaagctacctttataaaaagggttaagctccagggtaaagttcacaggacaggcacccctgaacacagtgcctgtggctagccagaatcagatctgcaagctgcaccaacaatcttattaacttcctgctaagtccctctgctcagcctgctgagcctgtgttgagaaaatgatgtatacaggtgagacactgcatcctaaaaccaacaaattaaaggcatgcagggagcaagtggagactggaaattcagtataatacggtattcttctggggaagctgccaataaaagctagtatcattcattcctgtactcgggacatatgtggaaagaccgctgagtgagcttaaaccagtggcacttcacctgatgccacaggaatggggtggagccagatgcataatccccagaaaaggctggaagcagcttaaatgataagaccctcaaagctccctcctcttcctttttggttaagttcctgtatgcttcttctcatttccaatgttttgtctacagtaacacaaggcagtgatttgagtttgaatgcccccctccccaccccagactcatgcttgttctgcatgtttgttccctggctgatggtactgttggggaggctgcaaaactcttagaagcaagggctagcctagtagcctaagtgtaccactaagagcaggcttttggaggttaccaggaccccaattttagcctccctctgaaaccttcaaccaaaatcaatctttccttgtgcaagttgtcccttcgggtgctctgtcatagaggtgcacaagcaactcccatacacaggtcttgcctcagctaacacttggcggtgacagataactcttgatgttaagttggctccagcgctcgtaggaccataataaaagtaaactgggtttaccaaaatccaccgcacaaagatgagactgacatagttcattcttttaatctagtttattaacccaagttggaacttaatactaaaagcaagagatctagttctaagtacctctagcaggttgggggaagggggtgactaattttcccaaagttagaaatgaagcaaaaattccaatactaaaaactcccaaacagcaaaacaagcatttgctatcatcattattaggcaacattaagaaaagccattgtttaccagaaaacacacgaacacacatgctcttgctacccaagtgtcagcaaccaccatggccccatgacacagcccagggtctccaggtggcaccacttacagaaagagagagacaacgtgcgtggaggcagcacccaaggatggtatggctgtcagttcattgttattaaggtacctgtaagaaaaagaagtaattcgtcacttggagcacttaaattgattaagaaaaataacaaatcagttaaccacaataaggatacaatgagatgtgacataaaagaatttagaatcagttttaagggaagacaagccacattggaaaaaacaaaacacacaaaacaaaaacctaactatttatcatgcccctggtttaaaaaaaaaaaaaaaaaaaaaagcacaaaaaggaactacattctggattcccatcaaactcaaaaatcagactaacaggaacagtgaaaataggccatggtacaggttctagccaaatgtgatcccatgaccatcaacagaaatgatcttggtaaactaaagtagtcacaaaggatttgggggataggaagaacagatccctcctagttactctggctctctgcccccagacaagggacaacatgagaatgagagctggagcctgctcactcacaggtatgacattccagggcattcagtgtgcctcccgacgtaacaagggggctggactcaccctcatctatttgaggttccagcttagttggactctgatgaagcctctcagtgatgtttgaagaaaacaaacaaaaacaattttgaaactcctctacagataggattcactctccaggatcctctcccgttacaatattctaaatccagatttccccagttactaccacttaatagaagggaaagcccacaaaccaaagtacagcctgcctgtctacccacaaaggctgtgtgatctgccctctttacatgggggtgtatttctaaatctgggaagagaatccaaagtcagacttccaatgtaagcccaaaatgccataagaaacccaaggcacaaagtcaggctttgggggcgggggggggggggggggggggggggggggggggggggggggggggggtagggtagaaagaaatagtgtttaacaagaggaattgaggggataaaaatggattatcttgttcccaatttcttaagagaggtctattttacaaaaagcatcttactccatttgaggacaagaacacagaaatgacagctgtattcaaacaagtacacgacttggatacttgtttgaataatatggctgactgccatcttttcagaaatgaatagaaggggtgggggcttgaattatctcatttgctttcttcagagccaaagtcagttagggatgaagcttggcaattactgactgtgggacacagaatgcctttttcactagcttcatgactgaagcatctggcagggagaaggcaggtctgtatcatgtggcaaagcctttctccacttaaagagcccttgtttgtagaaatagacaattaattactttaacagtctcttatctgactgccccttaaatcacatagtttctgcttcactgttatctcttcctgccctgccatttcccatcacagtgtggaagtactgaaaactctcatcagtcctaatcttaaccaataaatcttcgcagtacccaccagtgtactgattactagaaaggactggcaggtcttatcagagcaaggaaaactgttgagtatgtgttgccaacaagtcatcctatgtaagaactcgtttcttaaggaacactggaaatcagagggcgctggtggcagtaaagataacagcagtgctatgctggagacttcatgaagtggctaccattctaggagcttttccatctcatctttagatacctagatataggtcccagaaacatcccagtataccaatgaagcagtcaaaaccctgaaatgtacagtagctggaccaaagtcaccacaaatacgtgacaatggctcagggaatccagccttaagatctaggctcctaacaactacctgtgcttctttgtaattacagcccaaattccacgtgcgttgtccttgaagcaacttttgagtcagatagcaacaactgttattccctacattacagtaagtttaagtccatttaaatacttagcctggggtcatatgaccccagactagcacttcacatggatgacacagccagaagatgaacaaagacgggcaaagcagaaaagagcaagctcacaggctaggaaggatggggcaggcttgaatattcataacccctcaggtaacatcgagattgtttcctgcctgcttatcataactcaattttgaacttgaaacaaagagtatgagattcaatgcaggtgaacttcagctgaggaacctggtctcaggccagccctgctctgcctatgacacatcactccacttgatccataccccagaaccaaaagagtgaggccaagcggcaggctagcacttcacctctccatgagcctgctagaagtggattaggcaggaacagcaggctggaggtaaagattaacaaggaattgtatgtcttgatgagcagtcccggagcaacaggctcagtcagaaatagcaagctctaatttcaacagggctgcctgatttatggagaagacagttggacctcaaaggagaggaactagctgcacagctagctaacttttagattgtttctacttttaaaaagaaaaaaaaaaaaaaaaaaacgttagttcaatgtaagctgctagctccatcgctattggctccccagctgtttgccctgctgagaagagaatgcaatgctcagaaggcccaaatcgtcaaactcactctgagacatgaagagctgtttgccagactgaaatagagactggtcaaaaatagcagtgctggagcactaaaggaagagagacactctggatgtttagccgtctccatgaatacaggcattttagtggttaaggatagtgtgtgatgaaatacttgcactatctagggttctactcttccattccgcatgccctgtgctgtagcagctcctgctgactctacctacccacccctgacccaaacctttacttccattcaaagcactataaatcttcctgaaatgtctagcctttataaaccttttcctgatgattcgggaccacagcatgaatcatggcccaaccctgagctggaggaggtttaagtaaggtcaatgagatacacagactgcctgaccctaggacagaacctggagatgggatgcttcccactggcccttaaggtcagctgggtcattctgatcctgcagctttctcttaaaactacttataagtagcttgttaaagagagtattacacgctgcaagatgtacagtgtcataaagggcagttcacagtacaacatcattatttattaacctaatcaaatttggtttcattaaataatataaaacccaccaaagaagtaattgggggtggggggataagtaccatatttatttactgaatggctgaaatggagacacagcaaaaatttcaaacactccaatgaagaatacaaggagtattcagtgaaagataaatcttccttacacttcagttctgcccaagaggaagatgctgggacagttataatagacttccaggtttgtttcacacagacgcttacatactacacgcactgcttttccccttagggatatatcacgaagaccttcttttgaccatctgcagagttcatttactaatttatttagcacttggctctttgtagacagagtggctgctctgggctatcttctaacaggatggagctgcagctcacaggactcagcttgagagtttggttggttgtttcttacaagaaacaatccattagcagtagtgcttaagagcaaacatgggttttaaatcagggcttcagttactggagaataacactcacccaagattttccttggtaagcctttatgacatatacagctggttagataaaattgttttatatagtaatacagggtatcttccattagaattcatgagggtttgatccagaactccctgaaaataccagaatctactcaagaaccttatagaaatgcagtatctgtttgtaacctgaatatgtcctgggaaccctcaatcagctcaggattacttagcacacctaagacaatgtaaacactaagtaaaccattagattacactgtgcaggacataaagacaagaaaaagaagtacacctgtatgtgtttcaaacagatatattttcaatgaccaatcagaggttggctgaatccacagatgataaaaccatggatatggagaagcagtcacttagctaataatcacacatgacaagaagggcaaatgaatagtatgtgcccagctctgcccaaggcctgaatagcacaccaacccctcaggagtacactcaattacaaaccccctctaatgaagaaacaaaggcagttagttaccaggtagttgagcagggagtttggggcatgaggtcatacagcatggatttttaaatcacagagggcttggtttttctactccttgccaatcaagtgaccttcagcatgccatttaaccttgctgtaccttagtttcctcctttaagaaatgtaaataatacaagtaccagagtcacatgggtttgggcaggatccagaagaaatgaatctaaaagtgggaaatactaagagcaaaaaagcagtccaacaaaacaccccacagtgtctcggtctccctttacatatacacctatcgtaactgtctacacctgtgcttgtgcatgcacaccagcagggtaacagagggagcagcagcctgggacagtacagagtggaaccataaatacctggaggcaggccttccttgccctctccaggaagcatttagggcacggcagcatagtagcaagcactcccaagctacccgaggtaatgtgatccaagtgccttttcacagaggactgtataaatagccctcttattagaggacttagtgtccagcactttggtggaggcactcccggtgggctttcctcggggttgtaagcagtgaagactgtgacttgaaagcgctgcacaagaccatgtcctccaggggcctccaaagggcttgctttctctctctacccaacccacaatgttgtgtggttctagagcctccaaaattaaaccactgctaagccacaactactgtgcctgcctttggctccgaagaccacaaggtctgggagaactgatttgagccaaattaatttggaagcactggtgtgttgactgtggattgtgttctcgttttttcttttttttctcccatattcttacctagttcctaccacccactgctggtaacctctttgcgtcaccaggattttattatggttctcttaagaaaaaccttgggtctccaccagtgagaagttagtgttgcttcagaagtaggaaagagtcacagtggccagaagtccaatctgtcagcctcaaggatgtgttactaaatgacacagagttcatttagtagtgcagagttccagaagcagaagggaatcatacattcatatcagtcaggaactacaacaggactgaccatgggccattacatcagtatcacagaaaggggaaagggaaactgaagagccaagtcacttctgcagaacagatccagaactagaacccttatcttggctgataagttttggtgcctttgtgacatcagtgcctatggacagtccctcacttgcctcgccctaatcacagacctatttttgtatctcatttgacccagaacatcatctagcacaaagcagacactcaaataagtataaacaaaagcctgtgatgtcacaggaaatatcattttaatctctcccaataataatctctgaaactgacacagaatttgaacgcataataacctcaagagtcaacaacatcctggaccaaagcaaaacactgggttataaagccaactggcttctgacagagtaaacttatcaatctggataactatgactggctaaactgtgtcctcttcctcaaattagtgtgttgaagtgcaaactgataggacatcagagtttagataaatttacagagagagtctttaaagatggtattaggggagactgaggctgcagctcagaaatagagtgtttggctagcacagtcaaagctctgtgctcaatctccagcatatgggtaggagaatatcactaaggttaagtgatgccatatgggtggatcctaagtgacatgactgatgtctttgtaagaggaaatcaggctatgcatacctcaagaaaccaaggatgcatgtgcacagaggaaagacgcaaccatccacaagtaaggagaaagagctcaggagaagccagtcctacaggcttccagctccctgaaccatgaggagtcagtctctgctgttgaagccagcagcctgtgggatttgttactgaggtctgggccccctttacattttcaccctcccacccctggctgactgaactcatggacaaatgaaggaccatcacaaggcagttccaaactccttccaactctaacatttaactctggaagtttatgccttgtaaaaaagacataaaaatcagaaagtttggacatgaggatagggaatgcagctattctgcaaactatcattgaatgaagctaaaatttcattagagaagttgctataatgggacagaatgaataaccacaggacttttatcagttgcttgtagtaaaaatgtataaagaacttaataatctgataaaatgtctatagcagtataacttgatgatgattttatggtagttttatattcatattcatattcatattcatattcatatagagcatagctttatggatggactgggaatagggacaagcggatcagggacatgacaggatgggactggaatgccaggatcagatggtaggggggagatgaggttgagggagggaatgtagggagagacaggaagaattaaggggcgtttgagggggagcataggaacctagtgcagtggaaacaccctaaaacataaggtgatcctagcaaaggctccaaccctgattttcagtgtgcctactgcactataacatgcccttcatagaaaatgggctgcaacaaggggaaagaaattgaatatggcacccctttatccatgagggctacactccttggtccccatggatacctggaaccctacatacagtcttttcccacatataaatcagttgtagtaagagagtgacaataattaaaagaacacttatagaataaaattcatgtgaattgaatctcttacacaaaattttattgtactttctttttccttaaatgaaatacttcacagtttctttttagcacatcccattgtcaatatcgccaattctgtgtttggagaccattgctagggaaaattggcatcacttaacataagcaccacaatgccatggctgataatctggtaattgggtaagtggcatggacagtgtacacagtctggacaaacagataatttgtgacctgagcaaaaactgcaaaactctaccactctacttataactaagtgcagcttaagctcatgagctgtttatttctggaattttatactttgtatttttggttgactgtgggtaattaaatctatggatgaaagggatcatcttagcatcatttgttagtaaaagcccatatgtaaaagtcccttgctataagctgagaccacccacccagtagagtgagaacagtacaatatgaaaggatttccccagatctttctgccctccacccctagaggtttaggggaacactcacacttcctgcagattcgtcaagtcctcaaaaccatcagagtcaatctccgagagtttgttataactcaggtttctggtaaaagagaaagtgaaaaataataaattaatagttgacattgcatccaagactaagaaatctttcctcactcaccaagtccctcagaagaaacccattccctctgcctagtgacctcccatcctgttcagagtttagtaacacacactgagctttgtaaacatacctctcctcctcacctgcttcagtgcacacagagggcacacagcatggctgggaacccacactgccagagtagactcctgcagacttcagcagtaccaagaggctacctaacacatgaaaaattaagatggactagtcctagtccaaatgctttgcactgtgtcaagtccagagccactcactttttaaaattacatttattgggactggaaagatagctcagcagttaagagtacttattgcttttgcagaggacttgagtttagtacccaacacctacaagactcataactgcctgtaactctaattccagaggacctgacactctcttctgatatctgcatgttcatacacacagtcggtgcacatacatatactcaggcacacacacacatacaaaataaatatcttaatcatgtagtggcatcttgtttcaccaagacttgagataatagccacaccttagggtgtggcttcagtgtgtggatgtgaccccttataagaaaaggaggggctcgcttgttctctctcaggtgtggtcagagcatcataaaggacaaaggctgcatctccagaagcagaagaccaaggtggttatttaccatcattgtatgagtggtccccaagcaaatacctgttaattctttatctgggtgttcgtggacttactttaacctgccttcataattacatttattatttgtgtgtgtggggggggggggtcagagccaacctatagaagttggttttttctttccaccatgttctcaaccctccaaatgctgccactctttggtacagttcctcatggtgtggtgacccccaaccacaaaattatttttgttactacttcgtaactgcaatgttgctactgttatgaatcatacgtgtgttttaggatggccttgggtgacccctgtgaaaacgtcatatcaggacccactcactgctctaagccatgtattctttttcttttctgacatacattcttatcgttgttttgagagaggtatccctaccttacccttgttgatctggaaattgctatgtagaccaggctagcccaagaactcagagacaagcctgcctctgcagggttaaaagagcacaaggtcaagaccagccttaatggctctttaaaaattaatgttactaaagtatcaacatcaactactagttacagaaaaagagatcaggctgtccgcacttcacagtctaagccagtagttctccaccaagggtgctttcacacacacacacacacacatagacacacacacacacacacacacacacacacagagagagagagagagagagagagagagagagagagagagagagagagagagagacttgaacacacaggcgcgaatgcacatacacacaccacacgtatgcacacacacagtgatgtctagagatacgctcagctgtcagcactggtggaaggtggcactaaaatcttgtggtttaaaactcagatggctttcaaacatcctgccaagtcaagcagtcagtgtcccacaaccaggcatccagcacctcagggtcagtactaatcagactgagaaatcttggtctaaacaagaatttaagattaaagtccaaagagcagagacaaggttcaagtgacatttagaaatgaacacaagattcagaatagtcggactatgtatgcacagaggatgcctaccattgatgaataaaattagtagtgacaatcacaagaaaagggagcacaggttccacggtgtagtggttatcacatctgctttacatgtaaaaggtcctgggttccagccccagtggaagcatgataacaacacaatagaagggagcctactcgtagggatgtatattggtggtaacccccatcagggaagccacacaggcaccatattcaggttatagcaaccaatctgttcagaactgggcctctctccccagcacggcctagctatatagccttagctgcagacagagcaaatttggcaatgttgactcagctaagcttctttacccacaggctgaacacaagccagcctaatccatcaggaacagaagccactggaggtgatcaagatgagctttcactgccatccagctccttgccacaaatccacccaggtctgcgcatgcaggagaggttaacatttttcatcttggctattaattccatcgttaattgacattaacgacaattaacaatactactaatcataaatggcaactatcctttaaacttactccagagacatttcaatcaatactaccctagagctgatagccatttcactgtgaactcaaagacattcatctaaataaaagtcaaactgcacttgaaactaatggcccatctgtgttcatggcacagtctgaattaaaagcaatttgtccagagattaagttaccataaagactgaaggtggtaatttttaaaccacatactgaagtcaagtatgagcttgactgtgcttgggaggtatttattaatgagtatgtagacattaacagcttagacctgggaaagaaaatccagtttgagagaattccctacactcgtaaaagggctgacaggactatggatttctgctttgatcagattttcataaaggtatggggacattgtcttgtgggataaggacagcacaaagcttacatcattataagtaactggcatgggtgagctgaagagaatttaataaaggctgtcagaaaccacaaagcaggtagaagggcaagcagactgggtggctgatggaccaagactaacatggaagcctacccacccacctatcaggcatttactccttggctccagagacaagggccagtgctgacaccaggctaggctttccaaagaatctcaaaatctgaattcttataagaaaccttttcagttcctttaaaaaaaaaataaggaaggatggacaaaataaaatctctctgccagccacccctggcctgaggagctgccagtcaccctggcctaaggagcactggcttctcctgggacctggacacccagttccctcccaaagctacaagttcagaaggcatcgggtggtcagggtaagggctgggctcagcaggctttctccagcaggctcactgagattctgagataaaatcatgtctctcctttcccacccctcacatgtccatttaaacccacacacccattgctttgtccttccttgtaaggaaagataactaacttccagaagtgctaataattctgcttcttagagcaatgagaaaacaacttttcctgccacactgtaatccagagctgaggagcatctcaggacttggtactaagatgacagcgagcagctaccaggcaagacactgagtgtgttagctctcattggatcaacatgacagtcactgaaccagaaaagccacagatcaacacatatgccaagggactgcctagaaagggctactcagtgtcccacagcaccagtggaaagcacagagcaaaggtgctgcggctcacagctcctggaacagctcttgtccctagacagagctattctagcttttaagtttgaaaagtggtcctgaatccatgaagaaacagtgaacctcaaatgcatttgaggaaatggggggaacaatgtaattcctctgtagaaatataacaaggaataaaataacagacatcagccaaaacacaaatttccagcgacacttgttcactgttgtaaagtgtatataacataaaatttaccatttgtacgttgctgctcagtgaccacatatacattcgaatatatccatcatcatcaccaccagtatcaaccttttcacaataaattacgaattccagtctgcctggatatgtcaaccatcattactcctctccaggcaccacatgtcaatggagtcataagacatctgtccttttgtgtctcacttatttcacttaacacaacgctttcaaggctcatagaagaatctcattatatatatatcaaagtctcactgcttttgatgattgaataatcttggtatgaacatcctacattttgcttatctattgtctgcagacaaacatttagcttgtttctggtttgggctgctataaataatgagcacagtgtactttttttccaaattaaaaaattaacagtctttcttaaacctttgtcttctatgcttattaacactcatttttcaacattaaaagaaatatacttagcccaagagtcaacagaaagagtatgaatttttatttcccatccaagaaccatgaaagggttaactacagaaaaccattcctccaggtggcagctgacgtgcacatacatctaaagcatcccacttatttcaaggagcatggctgccccttcctgcctgacatatgaacaggtcttcagtgaaggcttcagattctcctgtcaaaacaatccatctgtcagcaggacacacactgtcaaaagtatttctgtacctttcggtagcaaagagcttacaaggaaagaaacctctgggaatttagtccctgccaactgcagctttcactgggcatcatcaaccactgtcacaacaccaattgccctgttcttacacaaagagcatgtagatctttgaacaattgaacccagccatagatactttttcagctaatctgctgaaagatggctgtgcggcccactgtctgcagaacacacaagaggtagggctgcagagaacagctcaagttttattcaggcgtgtccgaaaagcacactgtttaacagggcaagacaaccctgtgctcgataagcatgtttctcaacaagctctcctccctgagacagagaatttcaatagctgagaaatcactgccaccatgtacaccaggactaaccatgtggccttgtattgaaaccacttaatatatcagaaagtatgagctcagctcctcaccacattaaccgaacttcaagcactcaacagatgcatgtgcactgcttggaggtggggcacttcagctgctgctgacatttctgtgaaactgtgttgcaactaaccataagcaaccaatacttctaaatcattacacgattagcaactattctaagtaaagtggcaactacaaaagaaagatggatgttaaaagttaatctcaggggctccaggtagagtgcttgcctggcatttgtgaggccctggatttgatccccaacaccaagcagtatgttaacgataataactcaaggctgtgaggtacttggtgggagagtgctcacccagtactaggaagaccccaagtttgatccccagcactacatttctgtttcctaataacacaagagctttgtttaaaatgtacagtgatattaacaaatgaacgcaagtctttttctttttttcttgagacagggtctatgtaatacaattcagattcactaaacagttgagaatgaccttgaactcctggtcttcctgcaccttttaagtatcaggttttgggtatgcaacaccagcctggctcccaagttcttctcaaacaagttcttaactatcccagcagggaagggacactggaaagcccaagtcccttggaaggaaggtgattctaataaaaactgctccagtgtaatgctataggcttaatcagtatttacataatctgaccagcaccttcctggattatagctgaaccacaggttacaaacttggcgaacatccttccaagttggggaacaataattcattgacttcttggaaactgagggacaaaaagtaccacttactttttgagtaagctgcgatgaggaagtaaccccactttatgagacaacacatgagcacttcatcctcccaaacaaacctctgcaggcaaactctcccagtgcagcacagcaagacgcatgtttccggttctcagtgttagcagaaaataattccaagcagaaggaattggtcctcaatctgtgacaagcattccccactgaatgaggtttccctacgcagtttggtttccaagtgaatctacttcctattactcagcctggctgggctcctagacagcacagaattttttgtagtttaagctttcaaatatttcctaaactgagtaacatggcaaggggggagaaggttataagcaacccaatggccagcttctgagtacaggcctgtccccagagttagcccaggaaagtttttttcatgatactttaggctccggccattcatctcttcaacctcagaacttgcaatgcttgtcacttatcaaataggaaattgcctgcttagagccagaaaagcaggattggtccttttgagaattctaaagtacaacaagggttcaagccctttgagccccaagcattcagggctgtttcttctacatttgtacctttggggaatctcatgtcacacagcaacctccaatgaaatcactgttatggcccctacatctatttgcaaggtttgtgaactctaaggcatcacagtccttatctctttttctaatgtagatgctttctcaaacccacactgaagagcctgttaatacacattatattaagaacaacacaattgcaacttaagccagaatcatcagtctggagtccatacccaagaacacccttgctcttaaatgagccacattcacacaatcaaggtttagcaatggaatactttctgtgaataaggaaataggatgtgaatagtgtcccaacaagacacatgcccaacaagatacattttgtgtttctggttagttcaatttcaaaaagacagtaatggattgtgattatttccagttctaaaaatgctactcagaccatcctccctgagggtaagggaggtctaaaaggtaactcaaaagagaagcaaacacacagccataacagcacagccatatgaggaggaaaactcacccatacctctttaaatcaattaatcagtgtgagcctctgatttttgtttttttaagacagtgattcatatgtctcaactggccctgaaagtgctatatccaaggacaaccttaaacttctgaccttcctgtctctccattccaagccctagagtgacaggcatgtgccatcacatctgttttatgtagtgctaaggatcaaacccggagcttccggtgtgctaggcaagcactggatcaagcagcatcaacaggccggggcatctgaattccaataccaactcatgcttcttcagaaagtctagtatgtactctctatcctaacagtatacaatctgaaagagacatatgtctttatcctccagtacccaataacagtcaaattcaacaaatgtttgagcatatgtctaccatgaagactttctgaaatttattccaattacacatgtacatatacacaaatgtatataacatggggctggagagatgactcagcagttaagaccactgcctgttcttccagatgacctgagttcagttcccagtacccacatggcaggtcacaaccatttgtaactcaagctccagggatgtggcatttttcctggttctgggagcattgcaaacatgtggtacactgacatgcatgcagataaaacacccatacacataaaacaattttaagtgaataaataaattctaatataaattaggataagatgttatctgttgcctgaagattacaacttactggtcaggtaggactcctgaccaaataaccactgccaaatagctctcacaaagtatctcacagtagtagactaaaagttgcacaccgataaaccttgagccaaagctgggctgcagagaaatatgtttgtttatgagtcaacagtgtttgggaaaatgacttcaagcacccacatggcagctcataatcatttttaacagttccagacagatctaacatcctcttctagactcccctggcacagcatgtggtacacaggcatacttataagaaaaaaacctgaacacataaatcaaaataaataaatgccccctacacacaccacacacacacacacacacacacacacacacacacacacacacacacaccctaaagttttcactggtgagtatgctgcagcttcccttgagaacagtcactgtgtggacatttcagcttagtgaccacagactcttgctgacagacaccctctatactcatcagctgtatctgcttgaccccttcttgagtctcnnnnnnnnnnnnnnnnnnnnnnnnnnnnnnnnnnnnnnnnnnnnnnnnnnnnnnnnnnnnnnnnnnnnnnnnnnnnnnnnnnnnnnnnnnnnnnnnnnnnaaaaaaaaaaaaaaaaaaaaaaaaaaaaaaaaaaaaaaaaaaaaaaaaaaaaaaaaaaaaaaaaaaaaaaaaaaaaaaaaaaaaaaaaaaaaaaaaaaaaaaaaaaaaaaaaaaaaaaaaaaaaaagctaagctagaagtggagttgagtgagaggaacttgttttctggggaagaaaagctagaagagcaaagaggccacagaacaaaaaaagcaaagcaaacttctacaaaggtcgggctatcaggacctggtagaaaggaaagggcaaagcagcaagaaggagcccagggcttcctggcccacccaacaagcaaatgagtaacagttacaccaatcctaacccatctcagagttgagaccctcatgaatgttaatcacaggacccttaaagtcctttccacagaacacaattagctccctgttcttccaggaaaacgctttaacccaaagcatcacaacacctgacaggttttcctgtcaccactgcagatagttaacatctgctttcggcatcacaccttacaacaggagattctaggatctgttttcctacaaaatctttgcttggacaaagagagatgaagtaggtacatttattttattatttaagcatccttggtggaggctgacactgagaagaacccacaattttcccataatagtcatttgttaacatggtctgtgcacattcacccctccagatgaattaattcaatgatgatggtgcactccagcccaggactgctggttggtggacacttgacagcaaaaaggcattcacctgagcagagaatggctgcctgccacagcctgtggctgaccatcccacaaatctaccaccagaggagcagctccatgaccacccaagtgggacgaggtaccaaggaccaccatttgactttaccacttgagaagggcttcaaacagacttagaaatgggagtgagacggaggaggggtcacgatgctagcccctcagaattgccttttccctatcctatctgccctataaagggatcacaaactcacagttccagagtctaaattcattacttgcacaatagccaaccttgaaccccaatgtacgttttgtagtagaaagtgtggttctacctcagagctaggcacttcataacctcatgatggccaccagacctgagaactgacagtgcccacttctggtcatttactccacagctaatagcactcctgggaaaggcatagaggagtcttccaaatgttctcctgaagcaggaaactgacttttgcctctggagcagtgaaaatcaggtgggcaaaggggacagcaaatgagggatgggtgagcctaaggaaaaaaaaaatccctatcaatctagtgactaaatttggaatcctgggttctccaaagtgctttggtaagtccaccaaatgtgcactcttgggagatgggcttcctacagaggcatgcactctaggacagcgcgtttcctgtgctcacaagacagctttaaaactcactaagttagagtgtacacaggaagatggaaaccagttatccttatggacacttctgatgagccacagaatttagttgtcaactccggtagaaccactgcccacagaaacactgtgaccaagctcctgctccggcacctaaagtgattttcttcattcccagagactcccatctgtgtgtttacagtgaaagctgagagaggacaactgcttaagttgcaaaacaaccacctcagcacagctccataaggagcacccctgctcagggtggccaagttccacgcctgtgtttctggcagaaggtataaacatgcattaagaatgaaggctccatgattcattacttccgctgaatacaacaggcatacatcaaaacaaacaaaacttctctatgtgagccacccgtcacaccatcctaaacagcatttgccagttttctagagccgggaaatgacagacattttgtatggtgtctctcctgcccctcaagtgtaactatctcctaacataaaccaataggggaaaatattagtacaaaacttcccatcacagaaatgaatgggggggggttctgacttctaatactgacttctcaacatgtaataattaagagttttcagcatttatttacttattcattcattagttttctttcaggtcagggtttctgtgtatagccctggctgtcctggaactagctctgtagacaaggctggcctctaactgagagactccccctgcctctgcctcccaagtgctgggattaaagaggtgtgccactgctgctcaactattaagttttattttatttgatgggtgttttgactacaagtatgtatgtgcctgcagatgtcagaagggggtgttagatgccctggaaacgactatgtgggtgctggagctaaacctagatcctctggaagagaccagtctcttaaccattgagccacctctacagccctcttttcatgtttaaagtaagtagttagaaggataattataggcaaatatgctctgagttacaaaggaacaatgtataatatgctgcctatcttcctgcactaaaagggagggagaaggaaatgaaggtggttgttttaaacaaatacatttgtacaaacagcagcttaccttagtgttatcagtactctttcctcttactaccatataaaaagctttactaggcaaatgacataagtgagtataacaactttgccatgctgcaacttctcataaaaaaaaaaaaaaaaaatccttgctgagtggactttcagcttccactgcatgcatgtgtccttgaattttcaactaaaaccacacccactgctcgatagcatctctatgtgatgtcactaggaatctttatgaagcccaagcatctagaatctgtaatccaaatatgaaagcccatgtttactggaatgtaccaaaatgtactgcattatacatgctcttaaatataatgtacctgtaaacatcatttcctagatcagcagcctctctttcttacccaccccaaacttaaaattgaagattactcaaacgcagagagcagatacccggtagcaaatcaatggggaaaactgaagagacccacaactccacaagcagccatcttctgaatctcaggcaggtgtgggagagtagccagctgaatattttaatgaagacacagttctaagaggtcagtctcacagccagcagttaacaactttattaactagcttacagacatgggatttcattctgtccatttttccgaggggctttttaaagttcatgtgtgttatgaaatgcctagttaaagccaaacgccagtttttctttctgcgatagtaagacatcatgaaacactatgaacatgcaagactgtccttagcattaccatctctgcttgagaagcaggagggcagtagcaatcactctgctcctgacaaggcacagtcagtctgactgaacagcactagttcagtgcgcaccatccacaggttgctttctgctgttataatagagatcttccttttcactggattgcaaatgcagagagttggatgacacattcggagacctctctcctcaaatatattaaaattctaccacatcaaatggaaagctggctatagagcaaatgtcttagtttgttttttactcattcatcaaagaggctcacagcagcacgtcactcctttcccatgtgaaactgaacagttctaggccatttgttcccaaaagacaggtcttagagagttgacatgagcagtcaactctagtagctaaacaagaagcgaatgatctactactgtgtctatgggctaggaccagcaaagctgatcagaagtccttagtcacacataaataatcccttttggaattctacttaaaggcaaaatcctaattaatacaacacagagatctagatcctctgtaccctgtgtgtgcaaggagaggcaaagagtcaccccacagagcttcttcccatctgagcagaaaccaaagcccagggtctcatgaaacccggacacttacaaagtcgacacctgagagtctgtcccatgaacagctggaactttctacataaaaacaccttttcaaatatgatatcaaaccagagatactaatgagcctgctcagcactctgccctacatcaagggaccctaacaggacctccctggcccatgaaagtgcaagggtagggagctggtttgctgcacagttcacactaacaaaatcagcattatcttagaagtgccagactagttctcttccacaagagggaccaaagtacagtctgggattcaggcacagtctactcagcaggcaatcagctctgagtgccatatctgtacagtagatgggtttatacaagttttccctttctcatgatccgacgacattcggtcttcaaatcccaccaatatcattaaaaggcattccgacccaggttggcccaatgagtacaaaattgtgctagtaactaccctcacttgcagaaaactcaaccatgaccaataaggcaaagccaagtgagatcaggccaggctatacctgtacaagcacaaaaagaaaaccgactctcaaacctcgagaagcagtgcagaagagcacctgcacaaactcgtcagggtggtttataaggtcatgaacacctgagaaaagatcttttattcctaggggcatgagacaaatggtaggcctgtcacactgctggtgtcaatatttatctaaggcctgggtattcatgatggtataaaaccaggcatcttttcaattcagacattcatgtaatttgccactacaaagtcccaaaacagagattcatttacagcttgagtttcttctcttccacggccatacggaaggctggcggcaggacccacgtttgtgtcagcgctaatcccagcatcttgggaacaatgcgctcaatgtatttcagaactgccaatatcaaatggcactgcacctgaggacaataaagaggtaggggaggaaggcaaagcacctgccttctccccccccctccaggcatgcatgctttctgccctggaaatgagcaaagctttgggcctgtaataaaataactgaaccccaagaataaaatctagcacctctaagcattactcacaccacaacctcatttcagtcaccactactcgaagccatgtgaagcttacaggaaggaagacctgagctaggaaatggctccttctggttagctttggttttcccaaactctttcctccctcacccttccctcctaccttactccactcctaccccaaaggaaagcataatcacaatttttctttccaggaaaatgatagaagagataactagccatcaatatcagcttcaagaggccctccttgtaacccagagtccccagcgcatgctacactgtagctccctgtctgtcaggtcttgcagattctttcatgaagacacactgtccctgaatcaaagtacttaggaaggatggctccccgtgacagactaaagcctcttgtaaaaactgctagacaagtgacactgcctgcggcagacttctcaagccaaccctttgcccttaacttactcttctgtgtttcccaactggaggagcacccctcagtgactctagatactcagtgatttacacattccctggcttacagaacacattcccttcttcctgtttccagcagaatatgatggccgctgaagaactaccacacaccatgaaccaacattcctacccagctttaaatgtgctgcctggtgaacttgctggatgagcacacagattctcaaccacaaatggtaacagctgagggtgtggtcagtcttattttttttcttccataaaaatacacctgacacttaagtggatagtatttcctcatgcacattgaagttaataattcacaaccaactcgctttcatcaaggatctgaaaatttgaaggttgcttgtgcaaacactctgttcttaacagctgcatatttaactggtggctctgttgccactaggagcaggtagcacttcaaagtgttgtttgtgaagccagacatcccactacccaggttccgtggcccctgggttccacaatgttcaagacctgcccagcatctgcctctcagaacaggtagacaactacgataatgtaataatacaccacaagggtggtacttgctgttgagacattactgtaatcttgctttcctgtttctaatctggaccttccaaagtgacaatccccaaaggtaccagggcacaatggagggaagggtgtgactagaataaccaccattcaagagatgagctgcctggaccttagaggccctttcttatcacaggggtgacacgcctctgcaccttgtcatcctatccccttttcctcacaccctaaccctctgtgactctctttcctcagtctcacttaaaatcactctccctcatttttcaaaggaatgtcacaggcaggacatgaaacctaaagttgcatacaaatgatgccttctctgaccactacttgagtgtcttcaccatgttgaagacgaggagattaccaaacagctgctggctgttatttccaccaaaggaaattaaactggagatctgagttggctgcgctgtgtgggtttatgaatccatcccagttgcaaggcaacataaaggtccacctaagccttgttatggagattaactgctaactgccacacacctcgattagtggttctcagacttccatgctgtgaccctttaatacagttcctaacgttgtgatccccaaccataaaattacttttgttgctacttcataactgtaattttattactgttatgaattgtaatgtaaatatctgttatgaagggtcattcaacccccaaaggagttgtgacccacagactgagaaccgctgcacttcagggaaaactcgcctccactccctgcacaccttttcattgtttggggttttgtttcagtttttgggttttcaaggcaggccttctctgtgtaacagccctggctgtcctgtaactcactctgtagaacaggctggccccaaactcacagagatcagcctgcctctgcctctgcctcccagcactctgcccagctctccccacacaccttttatgtctcgcttttgaaaggactttctgcaagttgttgctgggagtttgaaaaggataaaaagtgagtctagctcttgatttgggttttaataaactaagacaggaacagacagtgttttcagtaacagaatacatcagaaaagccaagggtcgtgcacagcttgttgaggataaattgagcaactgatcatgtgtcagctgagctcaggcgtgcacacttactctcacactaagaatccaaagcaatgtcctaaagcttttgaaaaagcaggttccagcccacaacaccataattctgagtccagggtctattaagaaaatttttgttgttatattttgttgataattttttttaagcctactggctactcaaacatctactatgtaactcctgtcttgctttcagaggcacacccactgactagcctcacaaaatgaggtgctaagagccgggctatcagtacttccaaagtgaacctaaaaagcttactgccaccacgagggtttccaggcccccaccacgtcttcccactcagttctaaatgggaaaacaaaagcaaagaccagagaatgtcattgcctacccaaggttctacattgcttgaaaagatccaaaaccaacctcctgagtaactcagcgagctgatttttctctgctttcttgctttaaaagaaaccattgaaagccgtgctgcctatccaaataaaagccaccagaaccttagttttcaattacctgtcagtccatcaccctgaaactgctcaagttcaatcttcagtccctcccccagcttccggtctccaccaagcacttcacacctctctattataaacctgtccagaacaattaccctgcctacctttggacagcctccatactacatttctgtctaaatttatagctgctacactcagttggcaaagcaggcttgccccaaagcggaggtaatggtcaggccagagatgggtgcagacgcacagcaaacttcagcaggcagcaagaaagcgagtcctcccagtctgttctggtaacctacgcaggtgctgataaccaagctggacctagagtccccacagtaaccactgccatttgctgccacattcactgcttctcttgggattacaaacaaggggcaagtcactaagcaccaacagctacttttcttgaattttgtgatggctcaactgtcagacacattcggcacgagccacacttggaattttgaatgtgatcttttcccaggctagtagtgatgtgtagtctgatctttactctagaagcaaacaagccccagctcccagcaaccaacataaccactcattgtattgctaagctacaagttaccagtggcaaatacatttttaacttggtgtttccagctcaccatgggttgtagagaatattaccttaatgaattaatgagcatctgtaggaccccaaaagttctaaaagcctgaggacaacaaaccttagaagaacatccctacctggggaacaacccaaaccttacctaaaatcgcactacttatctatttttaagataatacacacttcataaatagcctagcaatcccctgccccccccaccatcaatatgtacttaccataatgccctggcaattttgcatgtacatattcaagaaatataaacccttacacaaaaacttacatgtcaacagtcataccaggttttgtggtgtatgcctacatcccagcgtccagaaagcagagcaaagttatagaacaagaccttgtctgagagggaaagttcataactgcaatattcttactagccaaaaggtggggaaaacccaaatgtctggctaacaaatgaataaacagtatgtgttatatccaaacaactgaatattattcagtgtttgggagtggggggggatggacagacagatcaggggttaagagagagcatctgctgctctgacagcaccaggggagctgaggctgtcttctgtcctctatgagcacccatatatgaggacaaagaaggaataatatgcacacatgtaagaactttgaaaatattaggctaagcaaaggaagatggcatgcatgacaggccaggtactgtatgtttccagttacaccaaaagttcaaaacaggcaaatcagcacagataacagatattcccagaagatgaggaaggaatggggtggtggaagcaccaacaagcatgaggtttgtgctccagcacaaatataaaatataaatttcaaaatattaaatataaaatatgaaaataagatgtcccaaaattagtggtgacagctgcatgatgctagacatactaaaaactcagaatctcaactttggtactcaaactctatctcgattaagctgttaactacaaaggaaaaagttgatgggtgtagttgtgcacgcctttaatcccagcactcaggaagcagaagcaggtgggtctctgttcagttcacaggaccagggagggctatatagtgaggctctattttaaacaaaagaatgagagcaggggaggggaggggagggcaggggaggggaggggagggaggaaaagctccactacctcaggactcaaaattccagagtaaaaatgctacctcacttcaatatcacaaaaaaatgtacaaagaaccttttcctctcaaactggaaggcacaggagaggccaaagtacccacactcatgatggtaaaaccatgataccaccacagccctcttacaccaaattacctcttttctgcttctcaaaggacactcactcccaggctcaatcaatccttgaggcataaaatctgagctggaattgatcctccctcccaccgtctccagtttttgaaagagcttgcttttcttttctttctttccttcttccttccttccttccttcctttcttcctttcttcttataagtaattttttaataaggcaatggaaagcagggttcccaatggtcagccattcaaaaattaaaaaagaagccagaaggcaagaggaaatgtcagttcattggggagaaaataaattagtcatattaagattaggatctaacctctttctgtggttggggcaggaggttttagaatagtagaatgctgtttctcgaaaactccctccagagggaaacttgggagctgcagctgtctggttctggagtccggctagccctttactgaagttgactgaagagtctctatgtgaatggccagtgagtccctttgcacagtatctgacccttcttagtcaagagtaagctcctggacaccctgggtaccagactccagcaccaccacagccagcagagatgtagctaactgggaagccccagagtctaatggggccaggatgctagccaacatcaaagagattctacttgctccccttgtgcaataaactactttcacccaagatcattcacactcccagagtgcaaagttcactctgatattggtggccttctctctctaaccttattggcaagtgccccttggcctagttattcattaatacataatcagaacattaaaagcattgtttcaccttttagggagactgtggccaatttaataagacactgttccaagattgggggaactaccttgagcctggcagagaattcaaagacacacagactgggaaaggtgcagggtatgtactcacaaacacacaagggttaagtatttcacaagatgtttttgatagtcgcacatggcaaaggggcaaaataaaaagttatctcgccatagaaatgccatggtgtttctttccccttaatctttgtaataccaaatgactcctcactccaaaaacctttacaggaagtggtatctttgtgtcaggaagacaaatggatgagtgattcttacgcacagtgttagaactgtctgccagtgttgctccattctgctacttttacttttcaaatcagacacaatgacaactcactttagagaccatgtttactttgctgaaagccacattctaaacacaggcttgtctgaagggggggcagcttatggtccaagcctgtttatgttccaagtaggtttgacagaaaaaccacatcaatttgttttaaaataatttccatttgctggaagctgttcctgaagggttctcggccacgctaatctgctctgattcctaccagctgtaggtaccatgcacactggccacagaccgggtaccgaggttgagtgggctgagctggctccatgggggccacagcagcctgggacccacagaaccactgcagtatccctctgtggaacacaagagcaatgcaggtctaaaaaagggagggagggagggagggagggagggagggagggaaggagggaaagaggaagaaaggagggagagggaaggaaggagaaagagagaaaggaaggaaagggaggaaggaagaacaaagaggaaggaaggaaggaaggaaggaaggaaggaaggaaggaaggaaggaaggaaggcaggcaggcaggcaggcaggcaggcaggcaggcaggcaggcaggcaggcaggcaggcaggcatacatgcatgcatgcatgcatgcatgcatgctctggtgtttaagggccaaaactatgccatggccaccaggaacacagctttctttagaactagacctgccctgtctcagaaacaccagctctagagagttcaacagtgctcaagtctcaagtccacagttaaggactccgaggtaattactggattgaacataagaaaaaaaagaaactttaaaaaggagtatctgtgaccagtgaaaagttttcagcctcaccatccaaagaaatgaatatgaagagattgcaaggtggttttctagtacatagtaacagaatacaaagtggcatctgggaacgggagagtgtgagaaaagcaagcacaaacttcccaagcttccctgcaggttgggagccactttcttgggggaagttgtagcaaaagttttcagaattttcctatcaagagcaacctatacttggtaactcagactagggaactaagaagtatataacaattatgcacaaaagggtacccaacaacagtcaggattttgaaaagcttaaaggctcaatatcagggaaagtttaattatgattcaaaccatactttttatgaagtctaaccatagaggaaatattcctaatactgagtctttaaaacatatgttgaaattgttgattatccaataccaagtggacagccctgaaattatatacacacaagtaatagtttatggactgaacaggttttattcatatacttaggaacacacacacacacacacacaatgcagaccatgaatttgagagagcaagggagggaatggtgcatgggaagggttggagggaggaaagggaagaagaaaaactatgtaattattttaatttcaaaaataaaaaagacaataaatatacataaggctgagctcacggcagaccccgcttcccaaatgccctctgttagcagcatctctgtgaaactaactgtctggtgaggacccaccttgagccaagccagcaatgactcctatgccattaggagagggcctatgtattcaaggatggagcaggggctaaagtgtcacacctgagggccacacagaaaggatcatatttacagtccacgggaccagagcctcctgttgtatatgtccctacaaatctgtgttgctactttggctttgtcccctgagggtacagtaacctgccctgaatattgtaagtactcgatccagtcaaggagataaatccttccctctgccaagagcagaggaagaaaaacgaccttggcctagtcatgctttctgtcaggggaggtcttagcagagtaaccaagagctcaggcaaccaaaaccagctgcctggcgagggctcagcataaactgagcagaataaccacaaggggaagggtgtctagacagccttagtctaagtgagaagcaaccctccccaaaacagtctccaccaggcagctctggcaaaagagcagctgagagaccatgtcaacagttcagaactacaccgtgagtgccctggtcaagcacaagtcagaagataagtgtgcatacagtctggcccacccgccaaggacagccatggggaagactccagcaaggaagtacagcccagggacccccatgtgagagacaggtcccatgcagtgctcccactgtccatcatcttttaaattccagttttaaggttaaaaccttcctgttctaaattttcagcatgtacacttggtagaagatgaagggaactaccaaacacataagtcagtaagaaatggagagatacatgagccctgggaagtctgagctctgtctggttatctctactgaacttagaaaaatagaataccaagggccacaatctggctcaatcagtagactaactatctaacatgcatgaagacctgggaccacttcctctccttgaataaagcaggtgaggtggcacagacgtgcaatagcagcacctgggagctagaagaagttcaaggtcattctctactatttagcacatttgaagccagcctgggctatctaagaccctaccagagggaaggaggaaccttcccttgtctacatatgtatctgtactgcctggacattttatatgttccagacatgtgaaaacaatgaagcattagaaagaaagccagtctttgctgccacgcagcttagggggccagctatcaaccaaattagcgccctgaagggcctatatgaagtacagcagggtcttccagatgggaatctgagtgaaatggaatgcaaacaatagcttccaggggaagaaacatttaaggagagacaagagcctccaagacaaaagaaccttcttccagacatacacaagacaagctggcagtacagaaactagaaaaagcctgggcatggtagcttgggcagatggaaccaggtaggaagacactatgacccttcaagagtgagtggacagcctgcagcagaaagtcgattctaacctgtgactctgcaaagaccccttgtggctcgagaggggtggggaaaggcagggacaaatcagataggagtcagtagctctctgctcctgcctcaagactacacgacaaacagaataagtacttttaaagttcaatgtaaaatgtgccatacgaatcagcagccagcatctcccttcattccttccaattctgcattcctttttctaaactgaaggctggggggccataggtcattggtggtcacagcattctcctaagaccacatgtatccccagcacacccagcccaaggcatgccaaggatttcaggcaagtataaactccatcagcaggctaaactgtttatatgttcttgagttaaaaatacaccgatcgggtcagcgttaacaccagggccttatcaccaaggctgtttgtgtgctggttacacaaggctggatactgacctgcccatcttttagatgagcctcaatctgcaaactgtctaatgatacatcagtgagattataataaagccaccaaatacacacgcatttgagaaaaacactttccaaacccaaggatactttactgtttataaatagtttactttttttgatccccaagcatataatattcgcagttgctccagaaaccaaagaaacatgcaacaggaacacaaaccacaacctaacagaaacaataaacaacagatggcaaggcatatgtgtatgctaccacccttctcaccaaagaagcaaagcacaagccagcccaggaagaagcctgtgcttcaaaatcacatttcagacaccattaatagagtaccaactgtacgccaaaactgtgctgggtactcaagccactcaaaagctgaggagccagtgattggcctcagggaactcagacttgaaaggaaagcacaaagggccaggcctggtcttagagtattcttcctgctatgatcatgtgcatacagactagacttctaactctagcaactgctaggcccagaccagtcctttaccagccctagacctggtgtataaaacatacattatgtatttcaacaggatgatgatcaaattagttaacacatgtatcctgatataaaaaacacaagctactaatattctacctgctccaacaatgtgttaggcactgttattttttgtccttaaacaagctcaatcaggtagacatttcagtcatcctcattttacctgaagaacctgaagcagagagaaaccaagagaattcacaaaagtcactcagataggcagccaggttccagagatgctgctctcaatgaaaccacacagtggcttcatctcccaccccataaccacaacctgtgacgtgaaggagctcacattctccaatcacggaccacggacatgctctagggccttcactcgtaagcagaagctccactgatttaaggagttcaagacgaaggcttaggtcacacaaactccaaagtcacatttgcagtagctagtgattctgaatagctggtgtttatgacattttgtaaatgttatctgacttaaaaacaaaggacaggagtctaataagtaagttggctgtggccctgcttccggatacgtacattccattttaagtatcacaatctcatggccaatcactctgctgttttcacctcagtgttagttttttttaaactctgactacaattttccaactgcactgtaactttaagcttttatgcttcttctacatttaaaaagaatgctgtttcccaatatataactcccagatgtagagttcactgatgattcatctacagaacaagtgttctgagacatcagctccaaatagaggaagaacttggaattccctcctctcaaagctagaacttgcctaaatctgctctgcacaacagtttgttttcaatta

SEQ ID NO: 32 - DNA, 43547 bp, Cricetulus griseus
  >scaffold_29 dna:scaffold scaffold:CHOK1GS_HDv1:scaffold_29:3784349:3827895:1
gccaactgtgggcagaaacatcccaaggcaggtggtcctgggctgtataagaaagccagacaatcactgagctatgaacaatcaacattcttttataacttgttctgtatttctttaactatgggtgagttccttgactagaattaataacaaacatgcctgtttttaatgttttgcttgacctaaccctaaccctaaccctaaccctaaccctaaccctaaccctaaccctagccctagccctagccctaggcctagccctagccctaaccctaaccctaccctaaccctaaccctaaccctaaccctaacccctaaccctaaccctaaccctaaccctaaccctagccctagccctaaccctaaccctaaccctaaccctaccctaaccctaaccctaaccctaaccctaacccctaaccctaaccctaaccctaaccctaaccctaaccctaacccctaaccctaaccctaaccctaaccctaaccctaaccctaaccctgaattcttgaccttttgtcctgacttccctcagtgatgactgtgacccaaaagtgtaagctaaataaagatgcttctcttctaatttgcctgtttattacagcaacagaatgaaaccagaaaagaccaagtaaagaggaaaacacaaaatgacacaaatgcaagctattccaatatcatctgtggtccttacatgaacaattttagttgttccttaaccaaaacttcaaaaatgcatttattctttcatttccttaatttttaaaaccatctccaataattttaacatagaacaatatgtgtactctgtttattttgatggtacgtagttttgattttctaaacttttaaaataatgtattatttcaattgtttgatatgtacattttacctccctcaactcctcccagatcctctcctacctcattacctgcccaacttcatattccctatcaaaaagtaaaaaataaggaaaacaaaaataaaacaagcaaacaaaaagtaacccaaaataccaaaacaaactaaaaccatgtggaatatgtttattattcccaactactccagagcattgggctgaccgaagactgtgattgatttgtgatctactggaatgtaccaccactggccaaaagcttctggattaggggtagtaacactctttgcttggatttttgtctgatttgagcctccatattctggccttcaccaacatacctttggtgaaatactgtgctccagaagttaagcagtcaaattcacaaagtaaaatggaaatataattctttgaggtttaaagagagacatattaataaaaatgaaatgtggagatcttgtccctttcctcttctccaggggccatgtatgtatctcttagggttctccttgtttactagcttctctggcagtgtggattgtaggcttgtattcctttactctatgtctaaaatccactcatgagtacataccacgtttttatttttgtgatagggttacctcgctcagaatggtttcttctagttccatccattttcctgcaaatttcaagattacattgtttttttttttttctgctgagtagtatgtgtgcaaatgtaccacattttctctatccattcttcagttgaggtgcatctaggttgcttccagattctggctattacaaatagtgctgctatgaacattgttgaacagatgtccttgttatctcctgagcaaattgggagcaagggaggtggggggagggagctaggagaatgagaaggggagaagatgaagggtgagaaggacatgagggagcagaaaggttgagtcaggggaagaatagaagaaaacaagaaaggagttaccataatagaggtagacattttaggtttacagagaaatcaggcacgagggaaatgtctggagatctacaaagatgacaccaactaacaatctaagcaacagaggagaggctaccttaaatgtcctcccctgataatgaaattgatgactgtcttatatgccatcctatagccttcatccagcagttggtggaagtagaagccaacacccacaactaatcactgaaccgaactggaacccagatgcagagaaggacaaatgaagagaacagggatccagaccaggctggtgaaacccacagaaacagctgacctgaaaaagggggagctcttggtccccagactgacagctgggataccagcatgggactgatccagaccccaggaacataggtttcagtaaggagaccttggaaatctatgggacctcctgtagtagttcagtacttatccctagcataggtgtggactttgggagcccaatccacatagagggatactccctgtgccaagacacacgggggggggaggggaggagtaggccctatcccaaaggaaatgatagactctgatgaccccttatggaaggcctcaacctcccctggggagcagaaaggataggtgatagatagggtattacttgtgggggaggtggcaggggaggagggcagggagtgagaactgggattgacatgtaaacaatcttgtttctaattcaaattaaaacaattaaggaaaaaatgatatgtgattatttcaagatagtgtacataacatatgtgttttctaaatgttctaaaaacgaatctcatgatctcacatcaaaaattaaagtgttttgcagtgcacttctactaagtagaaattaaagtaggatgcctacaatgctgttttcataagtttgaatagccaaatataagatttggagcattttcacatttgttacttgcaaattcaaagtgattttcttcatgttacaagaagttaaagtgccaataatgacttatatttttctctactcagtaagatattttctggtgaacacatggagttgtgataagtacaattccaagtaagaacattatagggacaaagcaatgaaagcatattctggaaaaagattttggttattgtatcatcatcctttgaatagttagtgttgtcagttatttcaatgtcacacagtaaactttacttcatttaaactattgaacatgtgaaatgtaccaccctaaacacagtccaaccatttttccactggagagaagaaacattatacaattcccatcgacacaacaggatagcaaaatttccataaattctctccaggaaccagattcctacacagtctatttaacagatactgacatcaaaaacctcttcagaagacattatgactacccaaagtgaacacctgctgattaaatgtggtagtttatatgacaggcaatattctgcttcttaaatcaacaaaatattttgcaaataactccagtaaatttgaacacattctaaagataaatgaatgttaatgctgcatatatccttataattcctatctacatatttcataattatcataaagatgcacatatattcctggtcaattcatgaaaatgaagtcacaaatctgttttttctctcatcttttatctatttttctatacttagtatttattttcatggtaaatatattttcttatgatctctgctatgtttatagaagtgtttgatatttaaaaagtgacttgttatggtatcccaaagaaatctatgaagtcaaacattttgtctttggctctttcaaaggtgatcaaacatctcccagcattcatatttgggactgaaagacacttagcatgcagtgctaaagcaaggatgtcagtccacctttgaaaatgttacaggataggcaattgcatagtaaaactaaggagtttgtgggattattgacaacagatgatattcatagacaatcataaaactaggttagtagctgcatggccctatgaaaagagctaatgcatattacataattaccgtgaggtcagcagaggaagagggtttgcagggaaatgtgccaatggtcatccttgagataaatgagacatgtgggcctagagacatccttcaattagggcaggtggagagcatgaagcctcactggggaaggaatttttcatgttgtcaaggttggagaaaactgtcagtccatgctagaccgcaacttctgaccagcaaggcctcccaacaactgtttcacaaaggacttaactttttggttacatttgtaatagaaatagagggatgatatttatatttaaaatatatagataatagtaatgcgcgtgcacacacacacacacacacacacacacatacacacataaatgcatatatactgtttctacaaatcttaacaaacaaaattttgaagataagtctcacaagtgaacagtcaattagaagtctgcagggtcttctgtcatcttactctctgaattggtaaaaccgttttattaacttccccaagatctcacagtattacatcatggtctggttccttgggtctatggcagtgatatagtacttcctttttggttcatttaagacacactgataaatgacgtctttatagagtttctctcagtatcagaatttaacctagaactgtcattataccacttaaacttcttgtttttatatggatagtcttgctatttttaggttagttatcacatattgagtgctataataataaaaaactaaaacttaattcaaaatattataaatattttacattctcatttttctgtatcttggaaattattcaaaatacggaaaaagataataaatatattgtgtgtcagtgcatgctccaatgattatcaattcaatgtcaatcgtatgacatgttttttgtaatacatcctatacatcagaaattaaaataacaataataaaaatatagctaaaagatagaataacttataatgatgttatatataataaaaaactataaaacttaatagtcctgaatcagctcattactatcagaataccccctatatcattagctcaatgttaactgatgtaaagactcctttacactatatgagtatctatcccagtgattacaatgcagaaaggtacgagatattctctacctaacattgctcatttcatgagatgtctcccttgttagtattgcataagaaacagcactgatatttaatatcttagaaattcagatatttattacttttcactagtatacaatttgactagttgtttcttctgagatttcagactgtttgagagccttcatcatctgcatcaaatatttcagatagaactgggttaaaaaatgtgttaagggttgcagtcaattttttaaactttgctgacacaagctctctatggtgaccataccaccctgctgctttatctcaaagcagccattgccaacaaaaaaaaaaatgcctgaaaaaaacaatgtcttagattttctattgctatgatggaacaccatgacaaaaaataatttgaggaaaggaagtgcttattttagcttacatgatgtgattatagtccatcatgaaactcaagacaggaaggaactcaagacaggaacatggaggcaggaactgaaggatagaccatagaggagtgatgggggaattcttttgtatatatatatttctcttgttggttgatgaataaaatactgatttgccaagcagaaagataggcggagctaggggaccaggagaattctggtgaatgaggtggaggtagagataccttgctgccaaaggagtaacatgctggaaatgggttaataaataagacagaggtagccaaaaagaagccctagtcattggccaataattttataactaatatatagtgtccatgtgattatttggggctgagaagagtggcaggacaaaaaaattgcaagcaacagaggagcactgttttactgggtttatcaacaaggcatacccagcaggttttatacaacttatgatcatttgcctggcagtggcaccaactcctgtgatctggggctcccaatatcagtcattaatcaagaaaaatgcccaaatggatataggcaatttctcaattgggattccacccttcctagataattatagtctgtgtcaacataaaacaacaacaaaaatcagaacaattgccacatttaaaataaatttcatttacaaaacagataatgaagatattcagtgtggttgctgtaacttgtagactcctgatttttatttttttataaaaatagtacagaggtcaaagacagatggacaataccagtaagtgtcagggaagtcaatatctttacttcttgaattgaatttatatctttatagcatgagttgaatttagagtagaatgtagttgagtattatcgcctatcttttaagcccagcatataattccacatgtgttaaccaatatattattataacataatttgcataggctaattaaatatatggatctaggttatcaagttagggtgttcacacatattaacaacactatgaaacagagttgttataattatgccccttgtaaaaatttattgcttaaatttttatttcagtttttacttagtattttatagtaataataatagtagtagcagtggtgtgattaaaataccataataatgaaaacaaatcctttggcaaaagaagttaaattatcataattaaataaggaatgaattgtagttggaggtttctcttcctgctgcctgtttcaaaataaccactaaggcttaatattaatataattgtttggccaatggctcagacatattactgacgagttcttacaattaaattaaccatttctattattctatatcttaccacaaagctcctagcttattacctcacatcttgcttcccctgcagctatatggggtctccatgacactgtcttcttttgttccacatctttgtttagatttccccctgaccggctcttttctgcctggctgttggtcaaaacagctttattcatatagaaggatgtctcccatcaaggaatgaaaaatgtaatacagtctaataaacatagatgagacacagatttttaaagcatatataaaaattacagacttccaaatttcaatgagtaaaaaacactcatgcataattctttaacaagtcatagccatatggagtactaaaattattaaaacctaagaggaaattttgtttcatttttgagttgaattttcagtgtgtatcgtttaattgtttcaagaggaagtttttaaatgacatgtttttctcattgctcaacctcttaggtacatgtttttcatattgctcaacctcttaggtaataaaacatcaacttacaacttattttaatggaaaaattatcatgtggctactatgactaacagtgtagtcagccaatggttcatatttttttttaccttcagttacctggacagtgtgggagaagccagatctctcaacaagaagggactcaccagaacagagaacttttcagagaagcatgaaaggagctattcatataaaaatatttttatgtttcctttcatataaaaatattttttcagagcctagggaatatgaacgtgtaatgaagctagttgaaattcatcttgactggatgtgcaatagagctatttgactcccactgtgttttaacttgaaggtacagtagcagtatgtatctgaaaattaaaggaacaacattgccaaaatagagtaatatggtttttatttattacaacattactgatctaccataaaccctgtgattttaggttatcaactacttgaagaagaatgacaacactgttttgtctaaaatccttgtttatatattctgattaggctccggatatattcacatcaaaatttgcaaaaataactgccaaatcctgaaaggaaacgtgtttcaaagattaccattccaagaggcttcacccagtagttgattgaagcagaaacaggcacccacagcttaacactgagtcatactcctggaatccggttgctgagagggaggagggatgagcaaaggagagcagactgtgctggagaaaccttcagaaacagttgacctgacctaatgagagcatggagacagtcattaagctggggaaccagcatcagacagaactaagccctctgaatgtgggtgccagctagaaccaatcagaagttagctggtggctctatgctttatgctttatggctctgggtgtgctttacggacaagtgcacagcaatgacgcacagagcatagcaaccaccctgagagggcctatgggccatatgtgggtaccccctagacactccccttaagctgccctacaagatcgctcggcagctggttcgaggtgtcttttctagccatctgtcatggcgggtgggtgaaagacccaagctaacatggggttagctcattaaaaaaacaataaagcctcatgcagtttgcatcaagctcttgaatctgccgggtgattggggtgaccaaggtggtgggctgggaccccagatacctgagtttttccgggggttaacagtagcatgtattctctattttattttgtttccagcaatacctatttaataatgaacaaagaatcatgttcaaatccaaaatatgagtagctttaggatgccaatttgacaagaaatattagaggtctttgcaatctgacttcagaatctgatgttttaacaatcttaattttattgtttttggaatacatgaaatatagcatgttttcacatacagaagtgaagaaataataaaaccaatgcttagaaaagaactactcctgcccttagtctttttaccacatgattgtattctaaatatatgctaacaatttctgattctgggttgagagatattttaatcagaaatgattaatttgtcttcatttttatatttacatagtttaaaatttttatatttattttatttttgaaattataatttcaccatctcctcctcctttttccttgcaaccttccctttttgtctttttaaaattcatggcctctcagtagacatgccatggtggacagtggaaagacgataaggcctcaactctacccagagaactacaggcaaataagggatgctgagggcagaagaaattgtgcttctaggagaacagcacagaccacctggttatctaataccaaatggtcagccatgaataacacaggcaaatagcattttacaaactcaacagtttacatttaggcatacatatgtatataaatatgcatgtttgcaggtaacaataactaacgacttaattttaaaaggagacacagagatgtagcctttatagggacagtggttgtgagccaaaagggtgctccagttgctatgagaaataccctcaaacatctaatcatccagggattacctagttatacagcatagtaggcggtaaatgagctaataaagtaagtaatataattctatgctggagtccaagtgttaagtgataaaataacatttaacatcaagattgtggaaatttatataaatagttggcaggaagaaaatacattatgttataatagaaaatatagcaaaataatcacaatatttatggcatctaggtagtataaaattttgtatatgttatttggaaaatggaagtatcacatatgagaactgttggatagcaaaaactagtaaaaagtaagcttggttctctgttttctgagctttcatgaatataattaagctccaaaattaacctgttctttaagattaatttctagttgaatagtgactgatttgctgggggcgatgtaataatctttgttttttttataccacgattttgtcattctttcttcagtcttacctcagaccaacatgcctgtgttttccagaacattttccatttgtgtcccttcctctcctcctagtccctcgcctcacctgcccttctgcctcacacccactctttcctcctgttttttttttttttttcaaaaagggcaggcttcccataaatatcattcagctatggtatattaagttgcagtgagacttgagggccagtactccaaggaagaatagtcaagagtcccaggatagaatcaaatatggctggcaatttaaaaatgcaatgaaatggttactaatgatattcatagattggtaactagaccaactgtcatcacagaggcttcacccagcaacagatggaaacacaagcagagacccacagtctaacattaggctgacctcaggaaattttctggaattaggggaagaaagattgtaggattaagatgggtccaggacaccataaacaaaaccacggaatcaactaacctgggatcatagggtttcacagagaccctatgcctgtgtaagattgcatatatgctacctttttgtaacttggtcttcttgtgagactcccaacaatgggagaagggggctgtctctgattctgttgcctacttttgggactttttcctcctaccagattgccttgcccagccatagtagaagagaaggtgcctagtctcactgcaacttaatataccaagaagaatgtttcttactgtcttgatagtgatttctctgtgccctgaggccaaggtatgtggcatcttcagtcatagtatagtgtattacgacacagttgtgctggataaccaagagcaatggcaatagcttgtgctcttttggagacttctagggcctccctaacccataacttgtagagaggtatcccatccttaaaaatgaaatttttgtgtattgttctgtgttatccactcatgcatttagaaagattgttgaaactatgccactaactagtgggtttgctaaatgttctttcatgaatgttactatttttaacctatcccctatcccctactctactgtttgagcaccttcacccaatataaatctttaactcccaatatctctgacctcttttttcataatatatgaattgggttgtaagacagtaggtttctgtattgctttgccacacacctgttttctggatttatacttcaactaagaccctgatttccccactcttctcacagctgtccctgcttaagcctgactattccctgtatggtctctgttgcagttttactcacaacccatatttcttcctccgtgaactatactctcttatatggcatttcattttatattttacaattattatttacatcatatcaaaatcatttctgatctctagcatattttccctgcctaatcatgatatctgtgcagtttaaattttattttaagttcaaattaaagttttaaaatcctttcaaaagttaccatggaacaaaaatgtgactccttttgggtgaactcaaaaaaaaaaaactaaatattttagagatgttatttttagaaaccccttaatcatcatctactataaaataaatattctatatataagccatcatttcctcctcagtggaagagttcataagtggtaatggtgtgattttagtaaatttcttcagtgatgattaagtggaacacaaggctaaaactgtgtctacacatatcatgaaatgtctgtcagtcacatacagccttgttagaagattgagagttctaatttcagaaaattatcatttctactcattcctaataaagcagcaaaatgtccctttgaggaaatccaagtaaatcttacagcccccctccaaccatatgaaaacatgtgtacttataagaaatgcttaatttcactagtagatgtttgttttttttaatactaattatgctgaagcaaaagtaatcattttctaatatagatctacaacttgagtctccatgttgggttattagaagattttcattttaactttaaattgtgtcacatctgtcatttaatgccaggctctctaacaaagcactttggccaccttcatcaaatgctccaatttactggagcagcaatgaagaccttgaagtcacacatgttgattactcatccttgttcatttgcaacacattttcatgggcctcagccctatagttttctgaagcagtaaacatgactataaacattttagcaggtccactaataaaatccaaggacttcattaattattctcaatgatgatgataatccctgtgcttaatcagttttatactttctaatcactttattatacaaagttttcatgttcatgaattgaatattggaaaacagtccaaagacaagagagcttgctgaaagttttttttttcatgatacaatttaagtacattaattttaattcatgcctgccatgttctcatctctgttgggagagaaagaatgagtaaagtttatcaaaaatcaccacgtgttattgcacacctacacagatgcacacctcttatttcatctctgtttaacttggttttgttattacacaatcttctttattactgtttccaactttcctctgaaataatttcctgctacctggaaagcatccttttaatttcctttcagaagggcctcctgatggggaagattattttccctccatgcctgtgtcattttcatctgtacttgacagaaaccctcactgctaactaactcttggaaacagaaaccttttcagttgattaaaggggccatctcattgtagccatcaactagctgtctgtcatagggaagagaggctccagcctgcttgtatatttttacctgattttctgtgatctcagccacatttgcttaattgttcacttctcatcgtggctttgatccttttattaattctctctgcctgtttggtttaaaatttaattttatgtggtattaacctttttactagaaaaacagcacactgggcttctcagatactcaacatgcatttgtaggaggatgaaaagttcaaggccagcccagacaacatagtgagactttgcctcaaaaataataaatgaaaagagaaattgagctacattgcaccgggatggctcttccatgtatgtccctgtcactagatctaacccacagcaatgaacacaaacaagtgcctattaatccaaagtttggtttgaacaaagtttgctgtctcatcagcgaagaacacttgttcttgcagaggacctgagctcagttcccagcacccaatcatgggaatcatgtctcacaaccatctctaattctggttccagggcatcaaatgctctcttctgacttcctcaagcactaggcacaaacatgggcatatgtatatatgcagacaaaacactcatacacacgaaatataaatataaagtatttaatataaatcatccagtcattccaaacatttctaataaccctcatatctcattatgacattctttcatttttaaaggaaattaagaactatgttcgtcagataactgagacctgtaacaatattactagttagtcctatgttaccattcaaagggcttttatagctaaactttctgtccttcatcatcttctatttctataaccacatattaactttcatatacccagaatatagatcactctaatttgtttcaaaacaatataagtgaaacaatgagctatatttctaaatttccaaagacatatagtaacaggcatcatttactcatcaaggattattgagatatgtgcttcagacagctttggagctccttactggaacgcaaaaaaatttcagtgatttatgcaaccagtagaaatgggaaaatgcctaggtacatgtgatgagcttttcatatattaacaaatacttggtcatgtgtattcttctgctacatgaagctatgatcttggacaaggaagactcattagatgaaggctcctacagctaagcttgatgtccaataactaaagctacatggtagaaggaaagaacttatttccacaagttgttttctgacaactcacatgccattgttacacacacacacacacacacacacacacacacacacacacacacacacatacacacacactaatactaatttaaaaatagtatgatcttgtctgctttcttaaaagcttcatcttctcttagagattaaccatttaagcagcttcttggacacctcatgcttagaaaatgtcttgctgctctttgtgggattcatttcactgttatacagccaaaggttttcggtaactaagactacatatactttggtgttaaaagaaaaagctctgaattaattatctttagcagaaactaagtaaggaatgtggctcaggaattagtgaaaacacagatcccagaaagccccattcaggcaatgtgagcagagggttctcataggacaaacacaaaggaaataaacctgatatgcctccattaggggcattattggggcatggtgttagttgttgctgcttgtcattggctgtaacttggtgtgtgatttctgacattttctatttgttgtcaagagtataatctcattagttgaggtttatttattgttaaggtacacttcagttacttatatgtgaactcatttcaattctcttgcttatttatactttaacattaggaaacctagaatgaattaagatggttttaatggatagaaagtgagagaaggggatataataaaatgttaattacatcattacttcttctattttgtttttcctgtttgtttgtttgcatttttgttttgttttgttttattcatgtattaaaacacagaaatcagtttccatacattactctggccacatatatttcctgtctgtccaggatcaaagagtccaagtaaatgttttctaagtcactttgttaaaactctttgcaaaaacactagggattttcatttagctttccacatgccaattcaaaaatcaattgactcttaaacataattttctttatagaatcattaccaactttatatgtaacaactaatattctcaacatcactacccaatatatccaagaaagcaacaattgctataattgttaatatttcatacactgtcactaaaaggtatatgaagcaaaataataaaagcttcaataagaacatacagtatgattacctatgctggcagatactaaaataaatggaaaggtgagagttgtgctttagaaggtggattaaagggaaaaaaaactgtaggtagcccttagaatgtactgggccaggtctacagtatatcaaatattaagaatctttatccaatagtggaataaaggatagatgcttttgcaattttataacaatataccatgagtgttctgctaagtcattggatttttgtctgagaaagtgcaaaatagtgccttcagggaaaaatgttttaaaatttatctctataaaaccagagtccaaaaaccacatagccatctttcagaactgtatccatccagcaaaaacagataaggcaacatcatagctgagaaggcttcaaaagaaagcacccagttacatttgtgcagaaagaaacttaatttccaaatccattttccgaaagatgctatgggcaaccaatagtgacatcaataggaaacagtacatctcgtgcaccagccataaaccatgcactgttcagaaaagattggcatcttaggtgccctctgcctaaaacttacatgctaaattgatactttgaggaaaatttgagagcaatgtcctgaaaaaaaagttcacattcctatagaatattagattgaagtcatttgttagttaaatgcaattaaatccatatcataaaaaatatctcccttttcattgaaataaaaatcctgagaaccaaggtagactttattttctatttttctatatgaaattactacatatgtagaaaccatacattcaatactttgtgatttctgtaggtacagccaagataccactctgcctcaggctttttacagctacagcacaactgtcaatcatgtcagatcatctggttcttagcggatttcactttgtcttgattcaacatttccatttcttttctaatttggtactgtggtagcttgaataaaattgttccacaatgactcatatttgaatgcttagtcaccagggagtgacactatttgaaagatcagtaggggtgggcttgttggaagaattgtgtcactggaggatgggctttgaagtttcaaaaatacaagccaggtccattgtcactcattttctcttcctgctgcctgtggatctgaatgtcgaattctcagccagcaagtgttcctgcatgccatcatgggccccaacatgaagataaaggactaaacatctgaaactgtaaacagcccccaattaaatgctttctttttatgcaagtttccatagtcatggtgtttcttcacagcaatagaacactcataaaatgggtttcattaatcttttaattactgtagaatcagttaggattacctacaattaatatctaatataaaattttctttatttttatgggagagtctcagtgctacaacaatttcattaatctcacaaatcagctttggtttctttgatgcattattttgtacatagtttaaaaactaaagaatatatcaatgatctcatgcagttagctcttttttgcatgccaatatgttgtaatgaaaccatattcatgatgatttaatacattacataaatgagtatgtaagataagtaattataatgtacatatgtaaattatataaactttaatcataagcaagttttagaaattaactttatcactgaataacaattttgcatctaatttgaaattatttgttctataaatactaccatctgtattatgtgcaatatgctgatgttcttatttaaagcataacttgagataaaacttacattcctcctaaaaggggtattttagaatgagtttgcatcattggttgaataacctgacaacatgatggccttgagatattctagttcccaaaatataactgagggcatttttcttccctggagactttattattttcaataaccagactctgtagtggtattaccatctcagagcatcatttatatgtgacatgcatttcactctcagagcaaagctttacaaaggtttgtcagatgctccctagaggatttggaaggataatgagcaaatcagaatatttctttcaaaattagcttcaatttctgttcaattagcctcaaaacaaaaagcaagaataaaaggcccaaataaagatgcaaaagtgtaaaaattggttcatctaatattctatttcaactgcagtatttccaagcttaatggggctttgggacattttaagagtaatccaaaattatgtgctctatcaactattttacactctgtgtatgagattgtagaattttctctgttctaaaatattcagaataattttctataactgaaaaatattttccattttcaattattaacagactatgaagtcatactatctcaatttattattctagatattggtctccagctgtaagtttctgtgacatgcaaattaatcactttgatcaaggctgtcctaattgctgtgaaaggccatgtcaattgtgacaaaataattgatagggataaagtttttaatctgcaaaaagttatactataaaagtatcaaggtcagatatgaaacgcttctacttatataaggtatttgttaaggaaagcctcctaggttcccaaaagagtacaagatccatttctcttaactgctcaacagaattagatgaaaatcccatattactgaagatgccatacagtttggttgtaagaaagaaacctagaactgaggtggaaacttcttctcagatgtctacattcacaatgtcagaagatgctgtatacactgctagtgaagaaaaggctctggtggtctgacctaggaacaaacactggaactataataccaactaccttgtaagatgtgcccactactgtaacagtggtacattcttaatggccaaccaacttctctctgattgttttccaggtcagctcttcatcaggaattttaaagatagtactacaattaatcaagaactcatgcctgaggaggttaaaagccctagaatggagcctaatactttcatttaactaaattgacacagtgttaaactgtctttcagaaaccgtttcaatcccatagacatactactataagacttaattagtgaaacttgtctataatgaaaaatagtgaatccaatgagtcttggctactcaaagtatagggaaaaaggattattgaatattcagatccaaacagaaaatgtataacacacattctaaggcttgggtaatataattgaaaaatggcagaaagaatataggagctagaagatagggagaaaggcaaaagaatgtgatcttctgagtatgacacagctgtcagaatcatgaattcacaaatgcttcagttgcttacactagaccagacttaatagacatagaaggagcatgactcatggaactttacccatatttgctgaactattggtaataaaggattttacagatggttgagttagtctaccagtctccattggataactccatgtcttggccacatagaaagctctggcaaactacagtcaatcacaaaacaaagcaaaagacacagacatggtcaagagtttttcacaaagagaaaggctgacagaattgaagggtatacaaatgagtagagggtgggagactagaatgcactaatacatgtgtgaaatttttaaataacacatttagttattttttaatgttttttcttttaacatatacttcatatcataaatacggtcagtattcttggggtttaatgctgctttcaaacccctggattcttctgttgcaaaacattattacaagcattcaagacactcaactctgccaccctttctgaattcttcttgtcttccatactctattgtaattcaaccttttattagaattctttaatgtttttctcataaataaagttggctactcttcatgaacttccagtacatataattgccccatgtttcccattgacttctaaatctttggtcttttgctccatttcacacaatgttccacttgcatgttatatcagatgttatcctcagtatctacatttccttcagtcagttttctacatgaaaacccttcagaagtaacctcatctcatttactgtgttaatcgcttttatacatttgagatccttgatttctttcaaaagttacaaattataaaatccatttctcatctatcatttatatttacctatcatctaactctatcatatatatatctatcatctacctccacatctgatccacaacaagtaatagatattttacctcataaatatattccaggcatttaaaatttagacaaggaaaaaacggaacatcgatgattgttatctaattaaaagacatagctaaatcagtaagtgaaaacatttctaacaattttctttatatttctgttgtttatgctttcttccaaggtgaaaattctttaatactcttgcttcttacaagaatatcctaaaattttcataaaacacatgcatattactacatgttttatttttatattattcactacctgatttaaaatgtaaccttccaaatagaaccttctaatgtaaccttctaaatagaattttggttgtgagcctaacctttaatggctgagccatctcttcagccctaaatagaattaacacaaatccaggttttcttttaacttgtagctggaattactgtttttcaattggatttgatatatacttaagcaaagcataatacaattgttgggaaatcaaaataattgaatgaaatttacaaatattcaatatttcataaggaattttacagagacaagataaattaaggatttcaaatgttttaaaaatattcatggcattcaaatgatttctcagtgattagtaggatgattataactgcattacatatttaagttaattaaagaaaaaagttttatacctagtgactttatctttcaaatagtaaactaaaaataagtatacatctataaaatatacttagaaggtcagtatagaaacattatactgaaaccacttaaaagtcacaaaaataatgacaattacttcagaaaatatcacaaaattacaagacaaaatgaaaagggctagaagaagtataaatacaaatgcatactcactgaataaatcagtgataatagtaaaactgcttggaataaaaaattgctatgatgtgttagtttcctagggcaacatagtaaattaacataaggaaatttttaatatttcttgctctaaattaatcaaaacaataatgcaccgtacaagagggttaccaaatttaaatattcaaaattctctaataattggataggaaataaactaatataattgtactaagatagcacaaggaaattattataatctctatagtaaacaatgcaaatgaaaagataattagttaacagagggaaatgaagtaataaaaaggcttttgtactgaattaaaccatttattaaaagtcttggctatagttcagttggtagaatatttgccttgcatgtgtgaatctcagggtttgatctgtagcagaccataaacctagagtggtggatcacttctatgatccctacattgggaaggcagagattggaaacatggaaactcaaggccaccttagttacatgtagagttagaggacaactggaatatgtaaaacgtatctcaaacatgcaagtaaataaaaataatacatataagcttattaaggaactataaaatacatttgaatacttagctggcagggcagatatcatgatcacaatgggcaaggcttattcattgcactctggatgtactgacccctgttattttcccaaatgtgggaaactcaactatataatttgtggtagtaggggactacattggagttctctcctgaaactacctttgaatattaaaatgaaatacttttgaaaaggttggagcaaattttaatactatctaaaataataataatgttcttttatttttgaatatttaattaaacatcaattaattgatgtgtttgtatgcatgcatttgtggtcacatgtcatgattgcttgaataggaatgaccccccatagacgaatgtgattgaatgcttggcttttccagagtggcattatcaggaggtatggccttgttggagtaggggtagccttggagggtatgtgtcactgtgggggacagctttgtggtcttatgtgctcaagctgtgcttagtgtggcacatagtcacctttttctatctgctgattaagatgcagaactctgagttccttccccagcactatgtctgcctgaatgccatcatgcttttcaccatgaccacaagggactaagcctctaaaactgtaaaccagccccaattaaaagttttcctctataagagttgctgtgaaggcacagtgaaaccatggaactccagaagttgaaacttgctgaactaaagtaagagtgcctttctcatggtttagagactgagccaataaaacaagatcttattaataggtttgaggcctatcttgaacatgctgaagaggacataaatgaagaagatgttctgggaaatgacaccatggaaactacctgttaaagaggaagaaactcttgaaaaagctgttgacttacatcagaaaaggaggtgggaaaaggtttatctgaattacctcagatcaagagaatgcaagagaggcctgaacaattcgattcatctataagcttgagagtaagaaggctgcttgggcagctaggattcgaatttcgttagtttcaacaaaaggtctatcatctgacaccaagcctatagttaacctggataaactaaaggaaagagcacagagatttgatttgaatttcttttccatctctagaaagtctgagtatgatgagaagctgaaaacagggaaagagagacttagggttgtgacaagttttaactacaacaggaactacagaggatacaaaggtaaaaagagggaaaagagtagagtgtttggggattgcataattaaaagttcatgctttctgccccacagtggtttccatttctcaaattcttcttggtttttacacacaccgacatgcacacacatacacacacagagatacacacataaacacacacatgcacacacacacctctacacacattacaaacagacagatggacacacacacacacacacacacacacacatacacacacacacctacaggaacactcacatatctcatagtgagaaagcatgtaacttaggtacatccttggattccagtagcagtttgatttaattgctactcagtatttaagcttgttggatttttgtttttaactattgtgtttattaaaaagaaaaggaaggaaagaaaaaaaggagttgtcatagtcatagtgcctcttcacagcaataaaaccctaagtaagacacatgtggggtacagagtacacctggaggtcatatgacactcacaagagtgacttttcattttaatgtggattttagggtcagagttcaggttgtcaagcctggctgctcaacccactgagccatcttactagtccagtataactattttaataactgggtttagcagaagctaccagagaataagcattaaatagtaggaagagaaatatttcatagggataaaagttaagctttccaaatcttttagtcctatgtctgtgtgtgtgtgtgtgtgtcaccatactttatctaaaaatgaagtctaaattccaattgagttactattaaataatagttaacttagagaaatatttttctagctattatttatgtatctataacatatgcctatgaaaatagagcatgtaagcaaatttattattttacttgtatttattatctttttaaatcgttcatatttatatggatgtttatgtatgcagtgtccatatgtgatgtgtgaatatgtatattttgtgtgcgtcatatgtgtgtatggtgtgcttgaaagtgtgtggtgtgtatgtgtgtgtttgcatgtgtggtatgtgttggtatatatgtatatatgtatgtccgtggcatggtctctctctctctctctctctctctctctctctctctctctctctctctctctctgtgtgtgtgtgtgtgtgtgtgtgtgtgtgtgtgtgtgtgtgtgtgtgtgtgtgtgtgtttacctgtatgtatgtgcaccctgtgtgtagtgcttacagaagtcagaagagagcataggaagtcctgggactggaattcagttagttgtgatctgatgctggaaaacaaacctgggtcttctgcaaaagcagcaaattctctgaatcatgaagcattctctgcaatccctttacttgttatatttgatctacctgcctctctatctagccaagtaacccttaaagcaaaattgatcctaaggaataacttagcaatttttgtgtatcactaagtcaatgttatgatttcataagtcctttgaccatggttatttaacacctgtgaattggagtcctttggttgatgcattttatgggtgcatatgtatgtggacaaacattacacaaacgcatgcataatctactcataattttgtacaagcagtgcatttgtcttattttaagctggagcccattattcttcttcatctcctgtattaacaacaatccctcaacttcatcaagtaaaatgatttctatgatgtatcagttctcagttcctagggctacaataggtgatcacaaactgagtgttttacaaaaaccaaaagacagaaattcagtttcttttcattatacagatcagatttctgaagtgaatttatcagcaggatcaccctctatatggggaggctctctagcttcttgtcacgtccaggggctccatcattctgtagcttacaacagcattgttccaatccccaatgtcctgtcttcaatgcccttcttttcaattctaagaaaaaattgcttacctaccccttaccttaacaaacacaacaggatttgaatcaggacctgggatgattacaaccagaatggatatcaaaagatttaatcttgagattctctcagaattatatctttaaagcctccatttcccattaagttcacaggcttaggttccgggtaaacctgagtttggtggagtcactgttaatattctctctctctctctctctctctctctctctctctctctctctctctctctctctctctctctctcctccctttctccttctctctcccttcatctcatcaatttcttttctgtctcacattttataatctgtatcttgtgataatttcttaaggttaaagtaacataagtagtcagattctataccacagaggttaaatactaattagaacactccagttactccatttacctctgagtgttttccttgaaaaaaaagttactacctctaccatagaggagttaagactaaaacagtgtatcagtatgcaaaccatataccttataagtgtgtaagaccttgatgttctcctctgggaagtgagaacttttttataagattgtgaaatcagtaataagatagtaagcctgctaatgttgtcaagatatatgacccatgtgttgtctgatacaatgtaactcattcaatatatattgcactgattagtaaccccataatatcaagtgtgtgatatgctatttgaattcaatcaggcaaacaaagttatgtctagccattctgcagtttgtagatattaagtttgatgattcaatctgacaatgcagatatagactctaaaacctgactcatcattgcattgttgtcattcatgttcagccatgaatggacctctctctttgctgttttttctttatacttattaaattatgaaactatattatgataaactaattgaccgtaataaatgaaattgtaaattttgtgaattctttttttttctttttttattaaattattaatattttcacatatactttccctctccctctccctccccccaaggaaggaattttgtgaattcttcatgaccagactaaaagtatatatttccagctgtattacaaaagtcagtagcatgttaatctagaaaaagcacaaactgtgccttgtttcaaatgactatgttactgattcttatttagaataaaccctacaattgatccagttcagaacagttcattgaagctgtttgcattatgaggaagaaatcggggtgtagtttcccttactttcagaatttcctatttatagataaaaaacatgtgaactctatagtactatcaatattctcagtctctcacctatagagaacaaagttctctcacactttaaagcattgtggaatacctggatgcaatttctaaccttggcaacatgggcccctcagatggtaacctgggttagtgtacataaaataggaaactcagatctccacattcagaccagtaaaattaccttcaatcccatttcctgattctttatcatgacggacagctgagagatgcacccagatttctcactctgggaatgccattccccagcacattgcctgtctcttttcaatctgtgacaggtgttgttattttatttgcatccaagacttttccaagaaacgtactccatagccttaatataattgttttgaaactctttctcaacaccaagaaaaatatgttacttctttcaagaaacagtaagaatcccatccatcaaagatccatttttagtgattgaatgtattattttacaattccatacatttctagtacagtctgcctatccttactaccctcgtctaatctcccacatatctggtatccctgcatccttctgctagtctctttctcacattaagaccttttggttttcttttgtgaccctttgattctaaccaaggtcacctatgtggtcatcagtttgaactctcatctggagaccatggtatacacgtgaagtgaatgactactcttacctcagaatctatcatctgctgattggtcagcaaggaggtatgggaccacccaaaggatacaatagacactaatgacaccctatggaaggcctcaccatccaggaggatcagaaaagatatgtgacagataaggttttagttgggagatgtaggggaggacaggtgggagaagggaactggaattgccatgtaaaacattcctgtttctaactcaaataaaaaaagttggaaaaaaatctaaaaacatgcacaaaatattgaattgatatattagcagaattttctattattttttgtaaatttcatttacattccaaccacaggcctccctcccacccctccatgcctcccccaagtccactccccatccactcctccaaaatagtaaggcctccttgggggattcaacaaagcctggcatgctaaactgaggcagggccaagccccacccccctgcattaaggcagatcatggcatctcaccatagggaatgggctcctgcaagctagttcatgtatcagggatagatcctattcctactgccaggggccccttaaatagaccaagtgacacaattgtctaccacatgcagaagtctagttcagtcctatggaggctctacagctgttggtgtagaggtgtagagttcatgagtttcaacaagcttggttcagctctttctaaagatttcccactcactttgagaataatttactttcctttttgactgacatttttgtctttttaggtcaactttatcaaagagatttctaagttcattattaagtttcccttttgtttatcttgctattatttgaaatatagtgtgtgggtgagttcttgcctggtatttccttatttcaatttctttttttctttttttttcaacattattttatttgaattagaaacaggattgttttacatgacaatcccagttcccttctcccacccatcctcccctaccactccccctccacaactaaaaccctatctatcacatatgctttctgctccccctggatggtgaggtcttccatagggtgtcatcagcgtctactgtatactttgggatagggcctaggcccacccccgtgtgtcttggctcagggagtatttctctttatggaatgggctcccaaagtccacacctatgctagggataagtactgaacttctacagtaggtcccatagatttccgaggtttcctcacagaaacccatattcctggggtctggatcactctgatgctggtattccagctatcagtctggggagcaagagttccttgatgttcagttcagctgtttttgtggatttcaccagcctggtctggactcctttgctcttcactcgtccttctctgcatctgggttccagttcagatcggtgattagttgtgggtgtctgcttctacttccaccagctgtttggatgaaggctataggattagttctaaaaattaaaaccctgtactggaatgcgcaaaatctgcatacaaattatgtttatcccagatgtataatcttcttgacctggggtatataataaaaccttagtatgatcaaacttgataaacattacattttggttcttttatatgtgtgcccaactatgtgggccgtagataggtaagagggtgggagggtgttggagtgtgtgggtgcatgtggaagtcagaggacgacttgcagaagcagattctctcattttcccacatgggactcagagattacatttagcttgtcaggctgcacaataagcatctttacttgctgagccagctctctggcccaatgagaacaaatttaagtgatgttaaagcccatgtttcccttgcttttcctacatctgtatggctaataatagttgtcaggatctttatcagtaacagcagtagacatttaatgcatgttgattagaaatggatcctttaaatgcatatatatatatatatatatatatatatatatatatatattcacatatttcctcaccttccactctgtttgatacagggtgtcttctctttcaccaggctagttttcccatgactttcaaaggactctcctccacctgcgtccctccatgccgtaagaaccttaggtacagacttaagctactgcataaggttttatgtgagttctgtcaatccaaaccaggtcgtcacaaacgcaaatcattttaccaactgagtgatttcccctgcatttttttatttctattcaccaaatgttgcttctaaaatgtatgctatctttaagtagcttaaaaattcaccctagctcatgcaattttattacggatggagatggaaattctgaacaaatatgtttgaatcaaagaattgtgactacagactaatttgctccattttaacttttcccacaagtgtgcatgcatcaacttggctctcctatgcttctgaagaacaaattccgtgaagtttcactcattggaggtcaaactacatgtcaataatttaatgtatttttgctaagtaattaaaaggtaacataagagaacacagtgtttttatgactcagctgtatcttagtagtaatatgaaattgtctaaagttccttccacatacaggattagggaacagagatttggagaattgagattcaaagatgcaaatgactgcatgttcaatagaggggacatcttctgtactaattatctgaagaaaaactatctaagagttttgaaaatctatttgcctgtgtgcatgtaggggggggtatgtgggcaggtttgcatgtgcacacatgagtgcaggtgacttcagatgccagaggcatcagatatccatggagcaagaatcccaggccattgtaaactgcctgatatgaatgctggcattcagacttgtgtcctttgcaagaacaatatgaaccccttactgctgagccttctctccaatcattaagggaatattttggaaacattacactcctaaggaataacgataaaataaaatgaaaatgtttatagcatttagttaggttgatatatattattatttttctcagataaatatttgtttatttagctacctgttttgagctgttaagaagtttctaaatttctaactaacacaagataatatttaattcttttagtgtttcagagaatcactattttaaatttaatttgaaatgttgtaattactggtgaaaaatgactatacacttatttctgtgcaaatagaaacttcaggtgaaaatccagaagcatggggaagaaaatatgctataaaataatttggattgttaggacattactgcaacctttaaaaatgttaaaataaattacaattatactaaaggcaaaataactgtgtaaaatataattacatcaaatataaataagctacaaagaaaatagcatttacttatttttggttaagtttagttttggttttaatgataaaatcaaccagtttttaattaattaattagttaattagttgccagtctagttacagtttctcctccatccctcctcccccacgcagtgcctctgctcagcttcatctcttccattcctcctttttcttcagaaaagtgcaggcttcccatgtgtatcagccagccatggcattatcaagttgcagtgagactaggcacctcatctcctattgaggctggataaggcaagccaatagaaggaagaaccccaaaagcaggtagcagagtcaaatacatcccctgctctcaatgttaggagtcccacaagaagaccaagcttacacatctgtcatcagaaaaacttcatccagcaagtgatggaaacagatagagacccacggcctaacattagccagagctcagggaatcccgtggaagagagagaggaaggactgtgggaacacagaggggccaaggacatcacaagaaaccccacagaatcaactaacttgggttcatagagactaaattctcagccagagagcttgcacgggactgacctaaacaacagtctatgaaaatagcagaatgtcattacaaatcctttcattgacttgttttgttttgccagtcatgtttagctctatcctgggtctcagggatatccactctctaggtcctggctctctaggcagtgttggggtatgctcccttctctcatggtgtaggactcaagctggaccagtcatttattggccactcccatattttctgtgccacctatataccagcatatcttgcaggaagagaaagttctaggtcaaaggttaggtgcctaagttgggttcctggttatgagagttgcctagttcaggcttcatatctcccattgctaggatccttagtagagtcacccttatagattcatacgagtgtccattgaactaggtttgtaattcacaaggatctgcttagttccttgggaatggggacagtgagtgaggattggccatagcagttagtctgacaatgagactggagtttggatatgaaggagaggagggagtgaagatgtgaaactcaccttcctgacttgctcacctccttgactttccagaagtcttggctggagggttcccagagaatgcctgctggagtgggggactggaataaaatggagtgtataatgtttacagaataatttcagttatccacatacaaaaagttttggtattcactcgacaatcagagttaatgttgatatgttattaaagtataagccaactaatgtccaattaaacaatttacttttatttcatggagagctggaaagtcttttcaggaaggtttcatttgctgttgttatgaaataattgcattttttgtgtgtgtgtgtgtgtgtgtgtgtttctgtgtctgctacctgttatgataaatttctcatttgtagaatttatataaaagacaggattccccaatggtttctgtgaagctatctttgaagtctaaagacctagcagaatcacttagagaaatgaatcctaaatcaattagtactttataattggggatatgttcttatcacataccatatgtataacagttgtgcattttctcatgttttattagttacttggaaatttttaatggagtattttgatcatattcaccccctttgcccccaatattgccaacttcaaccaggtcaacagccagctctgtgacttttaaaaccggaaataagtacagtttgtgctttatagccttggatgtgtgtctttcctctagagcatggtgtgtgtgtgtgtgtgtgtgtgtgtgtgtgtgtgtgtgtttctataatttgtcaaagtatatatttgcagaagcgtggttggtaaagagaaaaggtagaaactcaaactctcacccatgtgtacatacctgctctgctacctcatttgtggaacatatctggactttagatgaaaatgggaagaagttgtgtcagaacagcccatgtttcctctcagggggtaaattgagagcagaagcaacagaaggaagaggaagcagcatcacaacacaagtaacctcagccctgatgagagatttcaaaaacagagaggtttgaggaataatttaccatcagtaggaaactttctgacatggctagattggacagcgatgtaacatacctttgtgaggtcatatacacacgtgcatactctgaaactctatcagtaaagttctgaggagtaaaagttgtcactctttgcttcctgatgtgttgaatatgcctttccacaatagctggaaatcttgggtcccaactgtgtgtgtgtgtgtgtgtgtgtgtgtgtgtgtgtgtgtgtatgcatgcacaaacaagcatctttatatgtgtgtgaatgcctctctgtgtatgtgtctgtctgtctgtctgtctgtctgtctgtctgtctgtctgtctaactctgtctgtctgtttcttctgacagcagaggatgaacagtaacagtttctccagttatttacaatagataatgagaaaaaggggaacatagaactgccataccaggagaaaagccacacactgcaccacacagaaaagcacatttacactcaaggtttacaactggaacaagattggagaactcagactaaataacccattcaacctataatgacttgaactccactcttaattctgctattaatttttcagcattggtaacagatcaggcacatcactttaaagtgagtggttcataggatgagggtcaatgcctttatactgtacctgggaggtgaggcggagcaatcttctgtcatctggaagtgtaagatgaaaggtagtgagaaaaaatgaaataaaagacacagaactatcttaggaataatagttgtctatgctacactttcaaatagatttcattttggttgatacccactttcgttgctcatctctcagatcccattttaccatgctatattgttcccacccattttctcccatctgctttactctttttgtgtttcttatcactttaaagatttttttctagtcttattggcccctttcaagcttctttaccaacatttattcccatgtacatgttgaagtttaatgattaaaaggtacgagagagcatgtaatacttgtctttgtgagccattactaaagttttcatattttcactctttatgttgaataaagttctactcatgtgtatgtttaacattgacattatcctttcttgtgtcatccttgctgatcccatttgatggctattttcactaaagaagcaatggatatggttgagcaagtatctccatggcaggatgccaagtcctccactatgttcaataatgccataagttgggtcagatggtggttgttacttttagtttgcttgagaagcctaggcactgatttatatagtggctgcaccagttttatttgctacaaataggagatcagtatttgttcccaaattccagccagcatctgttctcatttgtgccaatggctattaactttattttgtgttttggtttttctagaaatctatgactataaagttttctaggaaatagaaagatattgattttattagtgaagttttcagggaatcgcaagtcaaaattccctattaacaaaaaaaaatcatcttctgacacataagtttttcatcctgcatggtttggtctttgtttttgttattgttgtttccttataaagtgagtcagtgtgtagtcactgtagaaaaaggaaaggatcaaattttgttgctatcgctccctagctggaggaaattgatcaaaatgtttaatctttttaagcctgcactatacataaactctaagtaggttggcaaatgcagaatgggtctgaagtcctgcataggcatacacgtaaatgggacaaacttggagttgagatgtgatcttacaaaaagcacatcactctagcctccatttcaaaactacacatttccaatcaaatctctacccaaagagttgccacagtgaaatgattaaatgatatttgtagagtatatattatagagtaagggattttactagtctttgtctttacttagtcttggtatatcagttctatacctttagttgcaatgtcttcttttattcatggtgggcatttcaaccatgaatgagtctatgttaatgatgtgacacaagctggaagcagatctccttaaaacaccatcaaggagagtagagttatggatttcagagctagttggtatctgcccagtgacttcttgaagacagaggaaattaagaagtgtgcgggcccagttgtatgaataatatcacaatcaattctgcacacataagtaaccatcattaacaattctatatagtggagcttccaggttagtgaagtcctcagtgtgtgagagggcattgggagtatgattcatactgatccaagtacaaactggaaagtaggcctatgtttggtgagcctcttactcattcatgtggctgtcttccttagacttgccctgattcctctaaatctttcagagtaaaagtatctttatcagcatagtatttccctgagttctttggatcaaacttgagggatttatggctactccctattttgaagccagaagtaccaatgacctgaggacttctaaattcagtgatcacagctaaagaaatggtagtcttgtttgggactataaacacttgtaaagtttgtgctaacatttgttgagtagtgttgcaacagagtgttctgttttatgacattcatatgtagggtgagcaaacatgaaagcaggcagctttctattttcaatatttttataagttaagcaatgaaatttaagtatgatttgtaaagcctaatataatttgtagctcacagattaaaattataatattaataattaaaattgcatgtaaatttatatgccctgtataggaaaatttttcaaaaccagatccacatttcaaaattacttacacttttccaagcggatattaaacgataaatgcatgagtactattttaagttccatactaattaaatattacagtttttggttgtgagcctagccttaacagctgagctatctctccagccctaaataatatagttttaaaaatagattatttgaagcccggaggttgtggaacacacctttaattccaacaacagcgaggcagaggcaggtagatttctattagtttgagacaagtctggtctacaagagctagttccaggacagcctccaaagccacagagaaaccctgtcttgaatgccccccccaaatagattgatcaaattaaatacttacaaatggtggcatacatagctgagcagaacaaaatggctaagtggtccagtctgtcatacaaaggaacccatagcttcttcatgagtagcacatggaagacaaagcaaaatttagactccaccttgaggataatatttctttaaatatcgtctactagtgttgggtaaaatttttttaaaaaggcatgacttcaaactgttccattctattttaaaatcatcagaagaattttgtaaaagaacactaattaagtaataataacttcacctctggtcacttatctggaataaataaccttaaagtatggacttgccaaggaccattaagcccactcttcttttgctacccaggaaatgccccaaaccatggcattatagacatttcacatcaattttcagtatcatttgaattaacaactgatgcgtagtaacataatcctagaatacatgacatgtcagcagtataggacctaaacacatttaaaataataggttaacatggaattatgataaattagggatcataatttttttttgtttttttgagacagggtttctctgtgtagctttggagcctatcctgacactcgctctggagaccaggctggcctcgaactcacagcgatctgcctgcctctgcctctgaaatgatgggattaaaggcgtgtgccaccaacgcccagcgggatcatacttttatatgtatagatgttcttatcttaggcatttaattttaatttgcagactcttttttaatggttaattcttgttcttaattgggtttatcaaagttgcctttccctgaacataagaggcctaagtaagctacaaatgccttagcaacacaaaacactgacatctgggacaaggacaaatttgatctccaacaagttgataataaatccttctttgttagcatatctggcactagggagatttccagagatctacaaggatgacaccaactggcaatctcagcaatagtggagagactaccttaaatacccttcctggataatgagattgatgactaccttatatcctatcctagatccttatccagtggttgatggaagcagaggcagacacccatagctaaacactgaactgaactcctggaactcagttgcagagagggaggagtgatgagcaatggggtcaagaccaggctggtgaaacccacagaaacagctggcctgaacaagggagcgctcaggaaccacagactgatggctgagacgtcagcatgggactgatccacaccccctgaacgtgggtgtcaatgaggaggcctcggcaatatatggggcctctggtagtagactagtatttatccctgccattcaaatggactttgggagcccactccacatggagggatgctctctcagtttggacacatgggggagggccagggccctgcctgggatgatatgacagactttggagatcccccatggcttcaacctccctgggtttcagaggggggataggatgggagcttggggggttgttaggggacaggagaggaggggagggagagggagctgggattgacatgtgcagtaagcttgttactaatttaaaaataataaaaaaataataaataaatcctttgcattctgctgtcacctgagagtcaattatgaatgtctttccttatggacttccatgaggagttgacaaagtctgacaaattaagttggggcaggaccaagcctccctaccctccattaaggctgagcatggcatctcctcatagggaatgggctctaacaagctagctcatgcatcagggatcgatcctgttgggagaagtggatggaggtgggttagcagtgaggtggtgtcaggaagaagaatgggaagaaggactttagttggaatgtagaatgaaattaaaaataaatttaattaaaaatgtctttcactatacacaaaggctgaagtgatggacagagaatgttttgtctgattttgaagggattgtcaattcctgaaggtcccaaatcctaatgttctcttatagattaggattttgacaaatgagctttgggaggacacaaacagtcaaaccgtaccaagaggtaagtaaatttaaccagtataaagtattattgtatgattctgggtagataattttgagcatattattcaggaaaataatacctttgaatattttctttccctcacccttttatttagaagtaagcttatgtcacctggagttccatatggcacaatagcaatgtttttcagaaaaagggaagttatgggggtttgggagatagctcagttggtaaagatgaagaacagagtttaagttccagcatctacgcagagaagtcatccagggcagcacttatactccctgtgcagaggaatggatcttagacactatgttagccatgaatttagaaacgtcatctatattatgttacaggttaaattatggcttgagataaatgatctgatgttctttctttatttttaaaccaatgactcaatgataaataacagatacagctctttcttctgattcccatattactactctcttatatttcagttgcttttaaaaactagatatatatgaatttacatgtgtgtgtaatgttttggtatatgtatatctgtataccacatgcatgcagaaaccagacagtgtcaggtctcttagactagagttacagatggttaccagcagccaaatggttcttgggattcaattgttttgggtcaagaaatatgccatattttcctaagtatttcctaaaaaggaatatctcaaaatttgctctcacaaatagctacaacactccataattccttcacagtgataaatgttatatacttacctacctaagtcatctttgagctagtgaatccaggagcatgtgagggagtatagaaacaagccatatctcccccaaattgtggctgccttaaaaccataaagcacactatggtatattacagacctggaccacagctttctccaggggtcgctgaatgctgccatgagtgtggagcacaggacctcatgatgcaccttgagcaacataactatagccaccatgtgtctttttcatacacttaagtgaggggaactggcttactgcatgcaccatatgtggcttatctgtctttgtatgcaagctagtcttaattaatagtattagaagaagagaggaaactccagtgatttttttttaatctgaaatattttcacgtgaactatacagggcaaaattgcttcaattaagaaaaaaatagtatatcccacagaaggtaaaatactaaatatttatcaagttaacatacatgtttaatttttatagaaggaaaacattctgtgataattcaagtaaaagtagtctttcactgaatttttgtagataatagtaggtacaagacattgaatttgagtcttgcatgtaagtgataattctgggcaactatcccaaccctaatgtaaaattatccaactttatggtctcttcactcttccctcacttgccactaataagtaaattggctcttgggcttggccataatacagaaatgtcatagagatcccagaatggtggcaattttcagactaataactaaaatgaggaaaataacaggacccttttggataattcaaaaaatatgcttttgcacataagacctcagagaagtctaacatctgaggaaattaaagcagtggatctcccccagcaataaaaggaaggattttatttcacttaatgcctctcccagatgatcaattttctaccacaatgaaagatataagaagttccaaaaatttgactatgcttaaaaatgcccactttgtgaaatctttcattctgtcatgtctaactgagacttttgctgagccaatgaccagacatggtctctgtgttactttatttgaaaaataaccatcaactctttatttaaaattcacatagttacttggtggttaagtaggaatcttcttcatataactggataaccaatcaaaatttgcccattacatgcttctgtgcctgtctgcacatacatatttaggtttgtcacaaagctcaatgacctgcatgtgtgttctcttcctaaaaggacacattgtccttgcatgtatctgttaactgactgaaaataacgggcactatggaggaaatgtagaggcaggactctagtgctttatgaagaaaatcataagaaatcctaccttgccattatagatgacatgacaaggatatcctactcatttcatcttacccagcagcttctctggagcatttttcatatattaaagcacaaataaaaaattcagttcatatgtgacccaaaactttcacagagttgtaaacgtgacatttgatctcagttactcatataaaacttctgcaagttctctatggaaagtctgggtcactcccttactagacatcaaaagcaccctgtgaagccatgaaggttttccacgttactgaagctgggttacttctagaatccttgatgttttactgaactgacatgttctacttgtgaatatcttataattgagatatttacaagtaatgttaatagtttttcataaaaggaactagaaccaactatcttttatattattttcattttcatacccaaattttatgtgtgtgtgtgtgtgtgtgcaagacaatatgtgtgacatctaagcctatattccataatgttatgaggattttaggcccagacagtggacatcaacatgacaatgggacactgatggtatacaagagtaaaaacaatagcaagtaaagaggtaagtggaggaaatgtggttaaaagacatcaaaaaagaacaataagtaagctctcttctccctccccccctctctgtctctctctctctctcacacatacacacacaaatacacacatacagaaaagaaaaagaactacaaaagaagtatcttggatttagaagagataaaactgggtttgagaatcagcagcccgagggagacatgtacaacagccactttcatgaggagtcataaaataataagtgcaatatagaccagaaataataagaacccagggaacgatcactgaaaaatggttgtgttgagctctcaagtgatttaggatatagccacactgggaggtaaaatagtgatagcaaataagaatagacctattcaacaaataaacagaaataatacactttaaggggcaatgaacaaagaatcattagattgaatgccacccttgtactgtatattcttccaagactccagtttggaagcttgaagatatgaaatctcactagaaattgtagaccatcacctagtgcatttgccttaagatttcttcattagcttcttaaccattaataatactaccaaggaacagtagcttgctaaccaacggcctgacggtaaacatggtatcataaacaagaaacagagcaaatggcttagtattggaaagaaataaacaaacagagtgggaagtgaagtctaaggctagataaccaaaaatgtctctaagactcagggaacatgagaagcaagagcacatgtcaggaaaacatatttattaggtgttgggtacctgcagttatataggcaaggaagactctcttaagatttagaggccagacaccacagcatcaacaagacagtatttattgagctgcaaggtattcataaaactgtactaaaggcatggagaacagactgagtagtgcacatagttattcttctaaaattgattcaaaagggagaaacatctaagcaaaaggaaagacagaagtagatgtaaagatatgtaattatctgttattgaaagttttgctttccttaagaaatttaataaagaaagcatattgtatttaaatccattaaagaaacagccctattcaaatcacatctcttggatgtatagacagggaaaatgattgggtaaagacaaaggagcaaagatttatgtacacagagttaaagcatttgtgtacagagcatgacttcaacctcagtaaacatggcatgctgggaaaggtccttttggattcccaaataattaaatgttatgctaatcttcattttttcccaggtttacaaggacatggggtgggctgcctcatcatcactttaactgttaacatcatagcattacccatggcctataaaatgccaatgtatactgtatactgtatactgtagtatataaaaacataacagtttgcgttcaacaatagacaatttaaacactctcaaattttctttcaaataagctaaatcatgggataattaaaactttgtctataaacagatatgtgcacatgacagaaaaggtaagcaatatgaatattcagatttcatttttcagatgttaaaactccttgaggtaattaagccatggatttgtgattctctaaacatatataaaacatatcaaacttaagaatcatactgacctgtaagatctttttgtgggagtaatttggcatctgcataaacaactggagcatgcttaactagattgtagctgtgatctagatccttttccaagactcagctgtcaatgctgagagatcatagtgaaacctcagcaaggacttcaaatcttcccctactttatcacttgaaagattttatattttgtttggaatgactttcactctctgatattaaacatgctttccaagtagactttgtttcaacatgctgagttacatctatcctattttcctctccagtccaggaataaacactcattactgtactgcatttctttgattcattaatacataaagctcatttctcatgttgcaaactgttggttgtttgcctaatctgttctttctctaatatttttttcagttcaatgcagatttactaaatccagcctgagtaattttaactaagtacagcatagtcttctcaaaactacatagatagtaaagtcatgttctctaaagctgcttattttttaagatttggttatttttattttatatgcatgggtgttttacctgtgttatgtttgtgtaccacatacatgcagtgccaatgaaatccagaggagatcactggatctcctagaagtggagttcaagatggttattaatcaccatgtgggtactggaaacccaacccagttcctctgcaagagcaacagtgctcatcactggtgagccatctctcccaccccagtgttgccttctttttatgtagaatgtaacattttacctttagtatttgttgtcagttacattcgttttaataaattccaaaatacatatatgtgtataaatgcatacatattatatatatttatatttatgtataaacatatacatacttaaatacatatatatatctagttagaaaaggtaattaataataacataaaatataaaatattttagtcagctttcaatttcttagaatgcggaatataacaatgtagaggaggaagggtcttctggtttcaccagctatgcacactgtgtatattgcttctgggcacatggtgaagcaggagaaaatggcaagcaaaatgtggcaggctgaagtgtctcactttgtaataaagagaggtcccagagtaagaataaagtgttgagtataaggagggtggggaacaaggcagacacccaggagaatgcccatggagacctgctcccttccattcggtcctacttcctgtaagtttcaccacctcccagtgattccctctgctgtcacaggagcctatatgctgctatttcatatccaaacaataccaaattgacaacatataagtcagaatttacaatgtggtaacacattttagacaaaaagcaatacatagaattacttctgctcttgttaaaacagaatttgaaaaatcacaaagtctttgaatcattccagaaaaaagtgtctggtgttttcaagacaagaaaaatatttttaattttacgttagtgtgtatttgcttaataaagatagtggtttcataatggcattttttgttgttattggttgtgacttgagcacactcactttttattacccactgttatcacaactgccccaccctccctgcatatttccattattctcattttatctttatgtcaaaatctggtacacgaataattttcacagatgacattatcttagaactctagcttgtatatcaacaagatctctagagtcgtctaattttatttaccgtgtgtgtgtttgtgtgtgtgtgtgtgtgtgtgtgtgtgtgtttctgtgtctgtgtctgtctgtatggatgtgtatgatttgtgtggcaacaatgttacccactgatccatctcaacagactgagattttaaaatatttgagtggtttgccataacacaagtttcatttgcttttacaaatatgtaataatccatctgtcctgtctcccagatttccccaagtgtttatttatttatttatagagggtttttactttgtagctcaatctgtcttaaaatgaggttctagtttttaaaaacagagagagaaatgattcttactatgtaaaaggagagtattgaactcctttgactatgctatcaggaaactagctttgaacttaattactgatgaaaatgaaactatcttcctaaaatatcatatactaaactttaagaatggtacataaatcagtctgaagagacataatatcatcttagtggatggcacagtttctgccaaagttcgtaagactcagtgaagtggttatagattcctgaaacctgagtcggctgccacaacaggatttctccagtgtttaggtatgagatgaaatttagacaaacaaaacactcaaattatcaactccctaccttccattggatcaccgtatatctaaaaatcctgtttgtttattaaacttttatatgtcattctatctagttagtgggactcatgacttctttaacac

SEQ ID NO: 33 - DNA, 318 bp, Cricetulus griseus
  >scaffold_30 dna:scaffold scaffold:CHOK1GS_HDv1:scaffold_30:19104144:19104461:1
catttgattggttgtggttttctgtaatggtctcaatctgttgctaagggaaattttcttaccgaggggtgaggtctgcaccctaaccctaaccctaaccctaaccctctaaccctaaccctaaccctaaccctaaccctaaccctaaccctaatgctgcatattaggacaaatatttacaatgtagttaaggatatacttgcttagtaaagccaaggttttaagttctccaagatccatgattaaacttggctctgggtagttgaccagttttcacactaggcatgatttcgctgttcttgagtgggtcttcaatac

SEQ ID NO: 34 - DNA, 41976 bp, Cricetulus griseus
  >scaffold_31 dna:scaffold scaffold:CHOK1GS_HDv1:scaffold_31:12785915:12827890:1
tttgtctctgagcggaactgactgtgtgactcgactggtctatgtgactcaggctctctatctctagaacaggaatcacagatgcgcattccctttaggatctgtctgctttctcttttaccttcaactggtgtgttgggggtgaggtaatgggacgtgtcatggcgtgtaagtggaggtcagaggacaacctgaagtctgtcctctctttccactatgtggctctcaaagataattcaggtcactgagcttggcaccaagtacctttacccactgagccatctcactcactggctgtttttgcttctttaaaaagtatttttgagatggggtcttgacatgtagtctaggcactcatgatgtagaccaggctggccctgaactgacaggcaatcctcctgcctctctgtctcctaagtgctgggatcacaggcatgcactgttatgcatggctgtgagggtgtcaaccatggggtggataacagcaccgagcctggtgcatggtggtccacggctgtcagcagtcacggccaggagcacgctggtgtacccacagtgctttgcacgagaaggttgggctcagcttagtgtcctccaggacttgctggagtcagagggtcagaataccacttctgatatgacttgattgtaagcctgggtttactgataaaaccattctgtgcctcagtttctcaacctgtaactgggtccaaaaacattactgtttactagtgctgtgagcatgactacatcatcaagtcagtggccacagcatccagggcagaacatgtgtgggcttgcagaacagagcactagatgctgagtaagttcaaaggatgagccctggagcccattgcaacaaacatttttgagatggtaaagaggggcctcaggctggacgcctatggttagctgactgggaccacgtgtacatgcactgtagaccggtgttctgggtaccagctcactcactggggcctaaaacgggaaaccaaaggaaggatgccaacctcagctctgccaatgcagagccgagccagggcccagtgagctgccagccctctggggatggaatggatgctaaatggagaaggcagggaagcttttcaaagtcgggattctagccgtcttccttgctcactcagcctttggagtaagagtggtagatccttcgtggaaacgtcccacaacccaggtttgtacaaacagctgataggtattgcactgggcaccacagaccctcacacagggtcatgtccctctgaggagcacaggcctgggaggctggatgatctccgggcagccagagagaggcagtgtggccctcttgaggcgagtgtctccagctgaaagctgccttccaacctcatctagaacattcagtcagtgattcccacttgggacctttacattgcaggctggtttgtgaggctgttaccaggttgaacccccccccccaaatcctacttgtacccctggttgcaggagagaaagttctagaaaatataacaaccagatgatggcaattgcatcgttctatgtcaggctaaaacttgggctttaagttctgagaggctcagctcagcctctccatccaggtgtcctcttgcaggccactagggttggggacagcctgttaccctctgaatggagtccataatgcccactgtgactatctgcccttatctttccccattaggagggagattccaactcgggccccatcactacctccttcctctcccctgcccccccccctccatgattagattctcctatacccaaaactaactcctgctctgggccaatcccaagcctgttttccagagtcccccttgaggaccctgtgacctgtccctgtgtgacctcacttcccaccactctggacatgcatggccccggcttccaccttctagttcatgccaccagcaaacctctggtcccctgtgttccccaccaggcagatgccatccttgcctcttctaaggtttgtgtcttctgcccatgtcttacagctggctctcctgtactctccttccctggcaactcgacctgtgtgctcacatgcctggctgtaacctgtgccccagacataggaagtacccagtaatgacatggggacacaatcttagaaagagccagacgctgaaggttccacgtcagagctgggtatggctcccaagggtgactcagaagtctgagcctgaccccccttgtgttcatcccatgactcctatgaatgtctgccggctcttcgccccaccttggtccatgagtctccacgcagccctcatccacttgcaaatctaacttcctgtctgcccttgttccagcagtacctattcctgtgctcacacacagccccgcagtccctcagactgtgccatgtgcaggaccatgtgcacagctggtgtttagggtggctattaccggcctagagattttacctataaaagaatgaaccatgcaggttttctgagcatggtgggaccattcccacctcagccctagtaacatggttacactcttgatagatgctttggagactggaggtaacttgctgcagcaggaaagagggggttggatttagacttgaatcaggtctactctatcaatcacttagtctgcagcctacatactggccaagaaattgttctgtgtggttcggtatttgcccctttttgtttctgcagaccggaatcctcactgctttgtgcaggaagaggacagatgctttctgagttatagtgggcaggtttgaatcagggtttctgtcaaaagcaccacattctaagtctagaacagggtgtgggagagcccaccccagtgctgaggatgaatgtgaatctaacttcattgtgacccccaaggctgccactgggaaacagaagatggacagatcttaaatgcatcaaaattatagcatctttcattatcagagataattattcatatataagaggtattatagctctaagaataataaaattaataataaaatgaatcaataaaaatggctacagaccatattgaaagggccatgccagagaccaaaaggcccttttggtaaaaactaggtactattttcagatttgtgggtactggggcctcaactattgagacagctataggcaaatcaacatcaatgtgtctcaatagaactttattgacaaaacacaatggtggcaacatcaagcctcaccaccatagtttgccagtggcagagaggtaaaagaacagcgtattttcgttacctactttggactcatcaatctggggaagccagagcctcaactagcattacttaagcactggcctgggtttgtttagcggtaacgttctcgtggctaaaactgacttgtcctggggacttgttagacaagggactcttgggttcttcccacagcccaccccccaccttagctgctgaccccagaatggcgacttgggggaggagctgacaggcctcactgcttctcttccaaaatgcaactgtgttttctaccgtttggccaaactgtagccaggacaggcctggagtgccccaccctggctctgctgatgttcggagaagctcttctagagccaaggaccagttctggacctgaaggactgggccttccctgtcactcacaattcagatgtcacctgaggatgtaattattgggtttactttgtggagaaacgtccttgcatattttctcggctcctttcctgagctttggacacctaagaccactagagaactttctagaacatagccaggccatctctacaggcttagtggaaaggacaaaatcccacgatgggtcagtgctggggtcagagggagactgatgactgggacatctgccaagttcccaggcccaagaagcacattgcacccttggggacctgtaagggacttgtctctccacatagaatatttatcagcccaattcctgggccatggcagatgctcggcagtgggtagcttgaacggatgcccttggccacagcaaagttggaatccctgttgttggatgggatgggtacctggccttcccaggaagggtgtattgtagtgttgggatgcctttatcccttgtttgggggaagtaggaggttgtaagctgtcagttcatctgaacacacttcacgtggcttttcctcactgttttttactgggatttttagtgtgactctgccaagggcatctgaaccttacttgagaggtaaggcagctgctttcactgacaaaaagaagtgggaagccggcccatggtccagcaccccaaaattccaaattaaccgctatcccagagagctctgtgggccagctgtagcatcaggctgatcacatggcagggacatgggaaagccgtcacttcctcctcaacccatggggactatattgtcagtgagcctcccaagcttgccctatccagtctgatttggtcaccagccacccgacccttctatgcagccccagaggtcagatgcagaaggggaagccaagtgagggcatttgtgtactatagaaagccacacacgctctcctgggtcatggggtctcctgatcagcttcctagggcctttaattaatgcaaaacccccactcctgtagggtgcagggtcccccaggacagcatgcaaacccttgcatccacccccacctcacagactgagaatcttggggctgtccagccctcgagagtgggatccgcaagtacggttggccaatgagcagaaggccttggggctggcacattctctgacttaacagtgaactcgaggtaagcaaacacagctggtgaccccagggagaagtagaagaatccgttacctttcactttgatttctcggatcaaagaccagtcactcggtctcataatatgttttgtatccagctaaggtgtgtgtctatcagctctgaaaaagacgtgcaaaaccatttttgagaagaaaaggaaaagttacctttgccctctatcatactttgaatttgtttctagctacacaaccagggacagagcttcacccttggactagagcttcaggccaactctctgttaacctcgtggcctgaacgaacccaacaactggggtcagtaccactgaggcataggactttatgcagagaggggtggtcactgaggcaaaaatccctcagcaagatgagggctgtgtatgtctctaagcaaccccgaaggcctctcaccagtggctgtgactgtcacagagataaagttggctttctctagatcctaaagaaaaggaatcccaggagggacccatctactgtgacagcccatcagaggtcacctgctttcctaaaaaacattcccccaaagttaatgctcttcaaagcctctcgcccctcagagcaatgaaaactcctgaagggaatgagagccgtcattgtttttaaacccacctattgtcttttctcttccacttggagcaagcctcttaccactcaagttttcagagccctcatcttgtttcctctggagggtacaataggcctgagtttcttttgatgcaaagaactgctggtctctgagactgctcttgggggtggggcggctggaacttgaatccaatctcaaggagagtcaggactccctggggcctcatgagaggggaggcgttctcttcagcatggacaagtcaggcctgaacttccagccagactggggttagtctcaggctgacctgggactataaggcccttgttatctatctcctctcacagtgacagtaagatgtgggggccctgcctttcctagtctctctggagacacagatggctgctctcctgcattccaggagcatcaggccccgaggcagccgactggccttcctgtctgcaccctgacagcgcctccaaaatccagagcaggtgtcattccttctggtgttaaaacataacacctccgaccatggccaccttaggggttttacctcaggccagcacccctgaactgcatcgttaggatgtctactgtaatgctcaaattagtttccatggaccaaaggctggcacttctccaaaatccccggttcccctcattcccaatatactgtttctgactccatttactctttcttttgagacagtgctcgtagctaaggatgaccttgaacttctgatccgcctacaaggagattacaggcatgtaccaacatgtctggcatgtgtggtgccaaacccatggcttgccaagcaagcatatcaccacctgggctatgtcaccagcctcgttcccgccttgggaaatacagatggcctcccccagctttcgctgacaccgtctcatgccttatgtcccctctacacaaatgcttctgggtctaactccccttccgtggccccagcctctggcttaggtccctgcctgtcagcagggtggctcctcctcccccacttgttgctcctagaataaaacagctcagaaatgccacatggctaagggtttcagtgtgtccccacaacaccaagctgagcagccctgaggggacagtgttacacacatgggttcaaggccagagcaccactgagtgccatagttgggggtcctgcctgccctgccttcatggactcagaagctgctaccaaagagaggggggtctgtgactggaaaaggcagtgtcccctgtgtgtgagccgagatgccccaccttttcctgttagtgatgaggtttctcagctgctcttggtggaagccagaggcgtgaagccagaggcagggcctctctctatctgaggcctacagctcaacttgggtccttgatgccaactgctcatccatcccactgtgctggtgaaacacaggcaaccccaaccgcagccttgcactgggctccaggtttggtgcaatcactgtttccaggccgagttattgagggtgagaaatgggggctcatccctgccaacctttctctggtattgtgttccagctctggttcctaaggaacccctatggggtttgagccagccccaaggacttccattggggcctttccaaatctggaatacctttagaaatcactgagtaaggatgctgactacctctggaagcttctggaaggaaagcacagcggcagccaaattctcacagggtctctcatatggacacctctgtggcatgtacccagcaatgctacccatggtctcctaacaaagagaatgaggtcaagaactctttgacaactaggactatcattctgtctccctgaatgttccaacaggaggtaggtggtgtggacccctgtgagggttctggccagttcctgggaatgtgagatggacatcaagaggcattgtgtgagagttccatgctgatgaggcaccctccacatgtgccccaaagccattggtcctagactcgctgccctctttggggtctcctacaaggctacagctggaaacccaaacaggacagtgcacttctgccatgagcactgtgatcagtccagatctgacttgcttaagctatgctgatgaccatgaacacgagagagtcaccagagtccagatctgctctctggccggcttcctgactcctggggccacaggcacacgtgggtagaggtcccagtgcatgttagaaagtgctgtgtgtttgtgacttgtggggacaaaaggaagcagaggcaggtcaagggcatgagggctctgatgttccagcaggtcagcaagaagcctgctgctcccaggacagcaatacaccccacgttcagatccctgcacatggacttgaagccctggaagaaatgccagaaagtgtagcctctccatcaagacctgggctgagtcccctcctgagccacgcctctcctgtcaagcacagtagaaaggcagatgaacagagcagcaagcatcgggctggcttcctctcccgtccacatgctcgccaccaaagccgtggcccaccccagactcttagaggacaggctgatgcaagactctgtgggtagagttcaggaaacagccatccaaagtcacacagcagccgtgaccacaaatgagatgaagacatagctaattgtttgggaaaccatgaatctcattgggcttgaaaggcttagtcaagggctacattgcaacttctgagattgcctgtgcctgcaaggtagaaccgaggccagaggagggcagctcagccttctcgctggagtagcaggtgggaacagaggcagcaaaaacggcttccccctgtcctcacatcacaggtcacgtggtgcccctcccgcactgtggatgagatccccagctcctcaccagacttcaagagaccttaccatcatatgccaagtaactgagtagtttctaaccctcccataaattccccttctagatacttctaggtcctgccacagtgccaccacttgctcacagagtccccgacacaggagcctacacgtgcccagggcaagaccacctcctgggccagacacctgggctgtgttgcactccccgccactacatgtgctcgtgtgttctgggcatttaaagtcttcccttgaccccggatgactccaggcatgtgtaccttcctcctacattccagattgattgcctttcgggaaaagccccacagggtccatgcgaggcctagaccccattgtatggctccgctaatgagagctgttggcccagccgtggtacttaggactcagaggtcacctggcatgaccgttatggtgtgcacatgtgtctttgctttgtccactgagtccagccctcctcccagctacttgctgtggaccgaactctctctgatccccaagttggtactgtgagctgttagccctgtgtgatggcatttgaagatggatgaagctaagggatggagagcttccctagcacacacaagaccctaggttccatgcaaagcctcacaaaatacaagatgaggctgacaagagagaacagtgccttcccaagagccatctgtgtctctctcagagacacagcagaaaggtttatctgggaacctaacagagcccatcacagagctgtccacaccagattcctgatcatgagctgtcagcctccagaactgtgaggagatggatgtctgtgggaccttgttacacagcctgactgcctgctacagtctcaagaggcctgttttgcccaagtaattcctccataatgtcctgagccatgctctctgaaaggcatcaggattaagggactgcctcccaggaccacagggctagcctgtgactaggtttgcccaaagagcaggtgctgctgtcagctccacgtcgtcagtgggcatctgccctggcatcttcacaggtctctgggtatcagcctctcctcacagctgcccatcctactcagccatcacactcccaggaaggtaataactgttcaacacagggccacacgaagagggaagggactcaggacaaacatcacagggagacactgttcacagctagtctgctggagcccaaaatctgccctgtcctttcatgggcacatcccttgccacctctataaaggcaacaacagtcatccctaacttcaggctttggaggcattgctggcagctgctaagacccagccaggatgctgtcacagtcatggggtgggggtatcttctcagcctcctaacatagaaacccgtactgaagatggcggctctcagcctacatccatctcacatgggttgtcttccttcagagggggagggtcagaattacaaatcacatcctgcccccacgggagcaccagctgcctcgggctgaccacgtgtggaatagaattctgagtcacccagtactgcaaaccagaggcctcagggaagctagcccagcagcagccagcaggcagacatgcgaggcctcagggcttctgagaaaagtgccttgctccaaactgtccccagctctcaggatgagtaaacccaacagttctgaggtgctagccaggcgatggcatactgctgggtgggggtgggtggagcagtttgcaccaaaccccaaggtggtgaaggaaccgctaccttcggctatgcccttgagagacatacatctgcaagatccaagcaacacaggacagtgctgcggtgccgacccccggcagcctctgaccccagcgccttcatttctgacctacccatgcccaccaggcaccttagtgggcaacattttcaataacctagaactctgtcctaaagaggcacaggactgtgtgtcagaggtatataggagatgccactgggagacgggtggctggccagtcaagcttgcctttggagtacctggagaagcacagaatccaggtcttgtgagaccccaaacttggatatatgtcatcccatgttgtcccatccgagacatgttagcaggaaccagtgtgcggacacctggctctggatgggttagaacgagaccctgggcacatggctagtaacacagtcttctggaaggtcctagtagtgtgtcacaggggccgtgtgtgtgtgtgtgtgtgtgtgtgtgtgtgtgtgtgtgtgtgtgtgtgtgtgtgtgtgtgtgtgcgtgtgcgcacgcgcactcgtggaggtcagaggtgaatctcgggcattgatgctcaggctgtccttcttagatgcttcctggtcatagggcgagggggttaccttgacctctgtgccacatcattcatctgcctgacaagatcttttccttaactgtactaacgagtccatgatctaagattgacctaaaactcagtggagttctggggctggagagctgactcaatggaaggacagacaagcagaacacagaagacagccagacagttccaggacctgcacgtcaccacagcatacccataaaaagttaaagcaagtgtgtcttggctagacagaaactgatacaggggacaaggcccagggagagccctgctctggtgtgtggaagccactgaccgcccgcatgggccataggcccatggggtagaatggacatctcagcagatgggactatgggtgattgactcagaaaaccatggccctgaaagtcaaccccaagtagaactgtgcagggtgatggcagggctcctgtgcccagaaggtgacacagcagagtctcttaatgacatcaggggagaaaggccccttcgtgggcccttaagcttggtaactcagaaccttggtgggtagtaacggtgctgaccctgctggacagaatgagaccctgcatgcctttcaagctctggatgacactctgctgccagctggtgacagtgtgatgaggattaccagagtcacattaagtacacgtctttcaggaatgaatttagctgaagagaactgttcaccaaaagacactatttgccatacaccagttaagcaaacaaatggaaaggtgtgaggctggagagatggctcagtggttaagagcatgtacagctcttccaaaagacctgagtttggttcccaggacccactttaggcagttcataacctcctataactccagctccagggactctgatgccctcttctggctcctgtgggcacctgcattcatgtgcacatacccacacacatacacacaaagtatcaataagaaacggaaaggtgagttggtggcccctgtgacggggagaacaatcacaagacaaggctgttcccaatgctggaagcagggacaccccataaccaagcaactccacaggcaggtctcacctgagatataaccccggcacacatgccaggagggaaagaaaatcccagacagcaaggagaaaacacccggaaacagcagcaggatgggtgagcaagcagtgtggtggaatactaactacaaggttggaaaaaacgggagaatggcagcaacgagcaagccacagccacttaaggtggaaagcaaaagcgaattccaggaagcgctgcagtgaagccagttctcaggcctgacaaccaagcgcacagttcagacagctgatgcgaacaaaaggaaaccacaagcatgggattcggggagccagtcaggtggagtgaagggtgtgccgaagacacagagtccaggcattgtgcttgcccggagcccaggagctgccactctgatgaggcgccctggacgccatcgtggctgaatcagagaccactgctcactgataataccacatacaaaccctcccgttaggggcaaaacccagacctggaagatgacacagcaaagccacctctcagagcatgagacaccacaaagcagggcagagcagggactacatggaaagtggccagacactaagctggccagagtctgcactctgcttggatccaggatgaaatatacatcacacacactacaatgtaaccaacatataacatgtaagtacaaatccttgagtatatagctaatacatattataaatgcgttatctataatgaacatttacagaacaattgaaactgtgaacactgcatcttatgtgattaagattttctcacttttaggaatgacaatggtaaaagtagggaattttttaaagtccttaatttttgaagactaggtcaggtagcccaggctagcctcaggctccctctgtaaacgatgctccacctgccttacctcaccagtgctggggtgaccagcacaccccatcatgcttgccatgtggggctgacatggaactcagggtttcccacactctgctgcctgagggctctttagagagtcatgactgcaggttctaggcagccagccttcgctaaacaatcagaggggccaaaggtcatgacgaggggctctggtccaaatttatactcaaggaatatcaatagggagtatgtaattttgattcttatttgttcatgtaagtaataaaacatgcaagccttagtttacacatacgactgtttcctccctgatgccccaggcacatggctaagcagaggaagacagggtaggaagtccttatttagatccaaccaatgacagggacaaaaggacctgctcaaattggccattcaaaccttaaaacatcaattatgttaaggccatgagttcataatggctccaaataagttgcaaatacacaactccaattgatcaccagggaaggatgttaaaagactggcctattatttgtaaagtggtaaataatggagaagaattggggcattcatctggctttcccatcgatctgaattctcccattgtgggcgcagggaagtttccctttagagctgttttccagcttaccggagaggaagggttggctgggtgggaacagagcgtcacccagcgcagttagtgttctgtgggagctggataggaacagagcgtcacccagcgcagttagcgtcctgggggagctgtggggggaagcattccctagtaagcactactaacttcctgggacaaggccatctgacgtcacagccctcctgtgaggtgggtagcctttcagttatgggaagctgaccacacctctcaaatgacttccagaggcagaggaacaggctgaacctccccactggaacaatagaggcagaaagaaactgggccagagaaactccacaggacaagccaccacattgcagtaaaaatggttgactaaatgctgggataggcccacccttatgacacatttgggggtgggtggctgtttagtagaggaggagtgtggggtacacacactgaagacaacggcagccactcttgagctaatcctaatgcaaacacacgataaaaccatcaaaacaaagaagatggctcagcataagttcctgctgtacaagcatgtggacccagaactcacggaaaatgtctgcatgtgcgggcacacagcaatcccactcctagaagacaggcggatctctggggttcaccggccagccagattagtgagctccaggttcagtgaaagaccctgactcaaaaatgtaaggtgacaactgagagaggaaaagactgggtgttgaccctctctgacctccatgacacagggcgcatatactcagagagagacagaggagctttctatgggctcccagccgtaaggaagaaggcagcaggctgacagaggccgtgggggcctccaaggcccccccagctgtgcgggtcctgccttaggcagcctcaggggtcaatgatgtccctgaagtgaatcacaaacttaaatgcctatgggtcccaagggaatgtgaccaaagccagccaagcacaggacaaccgacagatggtgtgatgctaagcagcccagccccagtcctcaccatgatgtggaggggtgtgggtgcagggagtggctgccgtctataggagacgacactgcctgggctctgccttgcctttgactcctgacagcagtgagtggaatgtgggctttttaaaacgttgacatctaacctaaatatattttttaaaaacactgtgtgggtgggccaagcaaggtttttcaggctaactacacccagggaataccagccggccacccctttcccacatccaagagctaactacaactcaatccatgtgttagggagacatggagagaactagttaatcagcttgggatcaacttattttaggtgttcaataaagctgagaattcaaaagtccccatcaacttccagaaatcggcaagcaccagctgctggccatttcaaaggcactctaccctcctccgtttgggcaacagagcctccactttgtccagacttttggaaaaccagcagccagggagtgtccttccagcttttctgggacagtagaatcaaagggccacagatgcaactcatttggtagctcacagcaggctctttagtccaaagagcctgcaccccagggtcctgcagcaaagccaagctggctgccccacactggatgtaatgtgacccaggggctgtccattcagctcacctgcccagagatctagtttcagagctgtacagaggctctgtgactaaggaccagagcagacacccctcacaccccaccccgagtgtcttccactttacccacagacacagaagggaccgtgcagatgagcaaagcaggccgagcccttccctataaacggtctcaatgtgactggatccccaaatcaataaaaaatttaagaggtgtcaaaaacgccatgggaaagagccaagttgatggtttagtcattccccagacccaagcccttctccaggtgctgagatcaagtccagtgcaccgagggcaagaagcaagcccaacaacatggtagagggcaaagcccaaagcccaaacccaaacagcagctctatggaatggggaaaacaaaactacacattcttcacaaaagaggcacaggatgggggctaagcccctgggaaaacaaaactccaccagctgcccaaagtgaatttactggtgagaaagaaagagcagagaaagtatagaaggaagaagagctggccgtaagccgctaactcactttttgggggtgtgcttttccatagagaagtaggttacgacgagaccagatatatgagggaaataaataggtatttgcatattacataaacacacaagattactttaggtgtggtctggggagcacagtctacaacactatatgcagtgacagcccaacttcccccggagtggctgtagcatctgccctgattcagatgaggtgcccaggggaccctgcataggggtgttcagtgagacagaggcatctgagcccttctgcctctgccctaataggaagtgaggtagagagaggtctctgtgacatttgccaaatgctgagctacccattccttttgcccagctgacccctttttattcccactgtgactgcaagaaacagcctgtggggaggtagctgttcaacagagctcacgtgacgagatgcgtatgggtaatggcatcttggtcctccatgctgggtgccatctgctcacagagacctggttctccggcacgcaggctgagtggacagccgctctgggaaagactttctgtggtctggtgtcttttgccctccaaaggcaagggcccatcctatgaagacatctaccttgcagaatcctagagagaggtagagcttgcctgtctggcagcagctgctggaaggcagcttcgtcatggccgccagcagcgtggagtgcacagagaatggacagaaaggtctaagcggcacaaccacaggcacaaggtactaaaggggcagggtggaggcaccaaactgagccaccgccggaaggggacagattcaggtcccctacaggctcggttaagggatctgcaaatgggaacccctgtcaaccctgtgggtttgtctgtgcacaggtggggttttctgaactttgtaaggagccttggctaaactgacaagaggaaaccaggcaggatgagagggattcaggctgagtcaacctcaaggcccttctttaaagcccaacttccctcctgatagctgcacggcccagaggccattagcctatgactgtgctgcggcggcagcagcagctgctctcggaggtgaggcagaaggacctgaccagtgtgactaaccgctttctatgcttgcagatcccagaccttacagggtgctggcagatggctcagtgggtactgcgtttgcgatgcaagcctgaggacctgagttcgaatctcaataaaacaaaacacagaaggagtgggggtgcatgcctgtgaccccagccctcctacagtgaggtagaaggtagggacagacctcccagaaggtgtgaggacaggtagcctggacaacacagctgagaacaacagagaccctgtctccaataaggtggaaggtgaggatgcacacccacggatgacctctgacctccacagaggggtacaaaggacacatacccaggcaggaaccccaatcagagccaacaggccccaaactaagactggaagcatgagccagacctggccctgcttgccatgcaagacactgtcctccatgttcatgacagcgagtgatctcgcagtgcccatgcacagggagtgtgtgttgctccttctgtagaaggtgaggaactcggatcagctgggttcatgatccaggacccaaggcagaagttcccaaacgggaatgggcactgtgcccaaggcgccagcattacttatttacaagggaaggggtgaaaaaaccctcacatattgcaggtcctcatacctgtagagggttgtggtacataaacacagtctgtctaagatgcctgcattccgtggctcagggactaagaaaccagcatcaaacggaggaagaggggctgggacacgtagcccaggggtagagcacttgccttgcatgcacgaggccctgggtttaaaccccagcacacactcccatacaccaagcatgctgtgaagatccaggctgtaattttgggtgacccatttgtaacactacactattgatttgggggtgggcgttagtacagctcagtattaacatatagcagggaatactcagttttcatccagtcaatgtctactgtttatgcatttcctatgaagagcaagagctgaacatctttcaaacagtgcctcccacacccatagatgcttgctcacacaatgtaggctgtccccacaggtcacctccaggctccagccagcaccaaaccacatcctctctccccaggagggagaaagacatcaagatgcctgttgagttgggccccagctccttctgcccccacagtcttcctgtggctaagacccaagggcacacccatgcccccagggtctgtggtggacttggtggtgagttggcctgatgaccctcaaaccacagttcagctgtggcatcaacatggctcccaggaggagtcatcaatggtgagagttacaggtgacagtcgcttctgagtcccccttccctggcatccctccctagggcctgcatccaggcacacaaccacagccaccctgcactcacacaggaagtggcgggggtgacctacactcctgtcccactttggctcttctagatgcatatggaacaacccaacttggggagagacgctccatctccttctgctagggattccccttcaccaaagccagcggtgtctaaaatgcatgagcacccccaggcccacactccgagattctcaggctgcaggccctagcaggccctatgactgcttggtgttatctcagtgtacaaacctgtgaaaatgtttaatttacaaactaaaaactaacaattaaaaaaaaaactattgtaggaaaaattgtgtaaaactatttcattccagaattttccatttaatattttggactgaagttaaacagaagaacctgaaactgaagatgagggggtgactgtaaacttttggttgccctggaaatgacacgtgaacttgactctctccttccaactcttgccttcctcacgtctgtttcccaaaggcagccagcgccaccttctccaaaaacacccagatcactgctgcagaaaaacccccaacaccacctgctgctctgacctcagggccaccatcacctgctgttcccactccccaaatggtcttcctacagaccttccggtggtagtgccaccctccagctcctaacctgtgcgacttcccgcgtttgtcatgagtcactcccttagacattggcatctacacttctatctgtccctgaacacaacaaaaacgccccaagccaaggctttgtttcttatccctccttcaaaagcctagggaaacgcctgactcaggaggcagacagcaaatcctcgggggtctgggcatgaatggtggtcaaggactgagggggaggaaatgggaagacagggagagctggagaggatggagaaggaagagggagggactccattgctggaccagccgccttcagtggcctgaactgcccaggtacaatctgaggctttagggagagagtgggcccatgagccagggcaaaccaggctagagttacggatgacatgtcaagggcggaggaaggggacctgctacacccagaatgtcattcatttcccctttcagggagacttttgccagcatctttaaaccaccagagtgagaaaagcagagttcgcagatgaactctcagcccaagaaggaacaggtgtaaaacaggcaagagcatgcgggagtactgcccagaagagggacacacggcagggcacttggtcatatgccaagttgggagacactggggtgtggagctccttggacccaggggaaaggctgggcaaacttccaagggcaatgtttgcctctgtgcagagactcatgtccattgtcctcagctcacacaccgccagtgtgtggcctatgttctgagctactggctctggcttcagggagagagacctctttgaatgacaactgaaaggaccccaaacccagtcaccctcaggcagatggaagcatgtcttgagtctatctgtctgctttaaaccacaaaaacacatcaagaaccccgtgccactgaataggtgtgcaggggtgggggttggtcctggttgcagggcctctcacgaggacccaaagccctggcaaccaagaggcaaactgcacccacattttctaagttcaccccggagcacagcaggccacaccaagcagagctttggaaacagagcaagccaagcaccaaatgaactggccaatgacaccttgctgccttggggacacatggctcaggcccagggagacaaagcataaatggagaaacctgaatatagcatttgagggactatcttgggctgcaggaccagacctgctgtgggccacacctcgaggactatgggctgacagaggacagaagacggtgggaatggctcccctcaaagtatgtaatccgttgctgtctaggaagtgccagggcacctcctggtctcacagattttttcatgtcaaccaggacagtcaaggctctgtcctgcaacaacctaacctttttaccttctaaatccacagaaccttcctacagaggattcttcccagttacagggggcaggaagagaatgaggggttgcaaaccctgtgaagaggcactgaagagaagtctcctacactggaagccatcggtgctcaaatgtctccatgtctgagggctgaaccatgttgggggaggggagctcaccccaacacacctgtgagtctgcctgtgtctagaaagctacctccagaggccccacagggccccccaacccagctgcttcctctgttacacccgccaccccatttgtacatgtgtggctatggcaggcatgggcgaccatctctgacccaccaaggtgtctacctacaattctgtaactgaggtgactagcattcatctttaatgcaggacaatggtagaagtgggaggggcagacacatctctgcttccagagaccaaaccaagccctcccagaggcggctgggagacacttgccctgtccagacacgaatccctaaagcgccttgcctccaatggggtcagtctcccgcctctacatagagtgagaccaggtacactccagggctctgggagctgctaccattagctgatgctctgttgagctctctttaccaacagctctcttgaagtcaagcagcaagactggttctcacccgatgtctaatatctcagatggaacgtgcccaggtcacctcagagcagtccctcactgctgcatctgactcccaggctccatcgctactcacacagcaatgctaccaggttggtctgcccaggcacacgggacagcactttgctaattgtcccaaaagatctttgctgaagaggtttgactctgggtgacagctccaacactgagatgagatcgttgctgactgaggctgtcagaagtctcagaatacctggtagccaggatgggcaggacttcaaagactctgagcaagcagcataatttcctgtcacccacatgtctgcaatcagtcccaggtctccatggtaaccatggcacctattctagagcaccctaccttgcttcctgttgggctcctgggagctaatggtcctaagtgtttaggggtgtaggtgggacatccccaatccaaaaatctaaaatgctctaaaatctaaaacttgagtgtcaaaatgatctcaggaagtttcaaattcttgatttctccagatttcagatttgggggctacggaggcaggagtggcaacacagtgctacagggtatccccaaatcaagaccacttatggccttggtgcgggacactccaccatgtaccagctgctactgcccatgaactgtgagctgcggctgggggtagggagcagcttgccacttagcatttctttgtccattttagaaaccaccatcccagatttctgatctcctggagtcttaaaggggagagaagtctcttctgcctgccccgccctctctaccttcaggtgtgtgtagccttcctctgagagcccaaccaaccctgtgtcggctgctctgacacaccatgtctctgtgcaggccatgtgcccacaagctggggtcaccttcacacaaggccttcttccatcctccccctggccctgccaccccatcagctgggctcatcccagcggaaacccattgctaccccccatcaatggtttctgtgtccaggcagcacgtgccagagctgcctgcagcccccattcatgctcgggatagagcccctttcaaagctaagctccctcctcactatccgcccctcccccatgtacagaagagggccataaagtgggttttcctccacaggaaagaaaggagtcttccctccctcctgccttcctgtccatctaaatctggccaccgaaagggtatggaagcagtgagacagaccccgttcatgacctcaggggacactccagcagccagaaatcccttcactggctttttctattagagtgaggggaggggacacctatgactgctggtacccactcccaagctccctcagggagatggtacatgtgtgtgacactaaaggttagcttttatcagccctcgaggtaaaatggagatatgaggtccaaggaggtggcagagtagactgggctggggggggggggccttgtcttctagaatagggacactgagcaagcacagcttcttaccgtcatccaggtaggtctggtccagattctgttcctgtttgactgtcactccagtgggcacagcgtccttctggtcactgactgggggtccgtttttggtagctctttggctcagggcagtctgttgttggatgactgtggggtaggagcctgggctcagcctctggccttggttgatgggaggagggccaggcctggcagagctggggcccaagttttcacagtacatgatatgctgaaactcctggtgccccccgccacgaagctgctggttggtgggtgagtagtgaatcacgggagaggcctgctggctagccgaggatgtgtgtggcagggtggagccctggccctggccctgagaaccagcatgcaccagcacagagcggtgggcatcagccagacccaagggtgctgccaggagggtcggctgctggtagcccagtaggcctggactcaggctcttgctcctctggtagagagctgctgcggggctctgctgctggtagcgggcatcgggggatgagagccccgagcggaactgttggcagggggccatagtagccacaagacaggaaggggactcggccagcattgggtgctgtgggtaatacggctggctccccaggcctccatgagcaggactgcagatcagagacgggtcatactcgtcactgggctccgtcttgatggcagggactgtggaagagaaaagcacagggctgcagccatcatggctatgcgtgagtgtgtgctgaggagaagggacagtgactggaagcctggctttggggcccagtgggtgcgagcacaccggtctgatgcgcattagcctctggccccaagatgcacacccccaccccagaattctcttcaggtgaaacttgaccttggtaatgccttggctttcccagctgtggatgggtagaggaaggctggaatctgtgcagccttattccccaaggctggagtggggaggagaaagcgtgtggtgactgcccctcccattgacccctgctgtgtttccgtctactggacgctgcccaacacagtgatgttcaattttcactgtcaacttgacaggatggagagccacctaggagacatgcctttgggtgtgtctgtgaaggagtttctacatggggcaagtgtgaaagcccagcctgaatgaggacagcaagatctcatgggctgggttcctttattaaagaaaaggcatccatctctgtctcctgactgtgatgccatgtgaccggccacctcccgctcctataccttcccctccatgaaaggcagtaccccctctaaatgtcaaaatgaaacctttgtcccttacattgcttttgttgggtactgttcatagcaaggagaaaagcaggtgacaccttccaaacatccccctcagcatcaccaggttcaggagggaaggacaactacacaatggtggagaggattgtcaccaagtgtgagtggagcagcctcccgagagtcagggttggaggaggtgagcaggactacaattctgactccaggtccccaagaccacttcggcaaatgccattcaaagggcagtgtctcagttctagaagctacagacctgaggggtggaccttgctggggttccattccaccaccccagcactgatgctcagcccagggagcctcgctaccgcagacgaggggagaacaccagagagcagagggaacagccctcttgctgcagggacgccacacacgcacagtttgtacaaggttctccctgcagctttggggcccatggaatgcccctgctcctcctgtcacatgggtcctcatggtggcatcttcatcacacaaatctactatgcaccctgctgaagctgagcccagatgtgtggaccactcagggacagtgtggctgtggggctttcagggctgggattacaggtttacaggccagtgggccttccctagcctagaggggtgtaggtgggggctttcccaagggtgagtcaatttattctgcaactgctgtagttactaacctatcggttgcctaggagtcgtcactggaagcaccctgtggggttagttccactttctccggcctacagaatttcgtgaatgagaccttctagtctgggtgtgcctcaggtgactccacccatgtggggacagtcagggaccctgagagttctagagcatgttcaccttgaccctgaatgtgatcaaacctaagacagggaggggcagcaagagacatctgcttgctatctgtctgcaaatgtccgtacccagcaccaagtaaaaaacatggatgacaatggcacctggcatcagtggctcacacagggaagtgccttccaacacaagaggaagctgaggctcagaggagtgagtcacttccctcaggtaacccagctgggagcagaccctgggcaccctgagcccctggccagtgctgtctgtgagcttggggtgtcggggagactgcctcacctgggtggtaggtaaagtgctgtggctgacttctttttctctttccgttgatgacgtagaagttcactttcacgggcactcgaatgtgcttgttctgatactcggggatctcaacaaaaagcatgttctagaaggaagcagttgtcatgaacttgaccgcatacagccatacaggagtcctacccagatcccaaccaagtccacctacagcaggccagctggcttcattccccacatttacagagaaatttgattgaagggaatttaacttttcatcccggcaaggaaagttggtctagcaaagtgtgtgaagatgtcagggccacaaaccaaagggcctggggctccataagtggccggctcactaagtgcagtttgtacttgctgagtaactatgaagttctctgtggggaggagggaagggggaggagggagagtgggatggagagacagagggaggagggaaggataagataggaagagggacgggagaagagaaaaagaaggaagggaaggagaggagaaaggaaaagaggaagaaatggaggaatacagtagagagagaagaaaataaagaggggggaggagggggaggggaggggagaagggaaggaaggaggcgggaggaacaggggacagagacctctgtggggtctctgagctctgggggtcatcttgggggcttacaggctggctcttgtctttatccaccgtggcttccatctcccaaacctgctgcccatctggaaaatacaaaaacaacaaacagcctttgaaggaaccaggagaagccaacagcgtaagacagcgccatcaacccacatctccaccatatccctttagccgggtgtgtcggtgtgcaggtgttcctgtggtggggagagggagggagggagggagggagggagggagaggatgtatgtgtgtgagaatgtgtatatgtgagagagaattatgtgaagagttgtgtgtgagagagagttgactatgacagagttgtgtatgtgagagtatgagtgtgtgagagaattttgtgtgagttctgtgtgtttgagagcgttgggggttgtgcgtccacatactcaaatagttttttttgcaggagagaagcctatagaaaacttagcagtaaacaagcaaaaacaatttggaggaaccgcagactccaccattgtaatctcttccaattcaaatggctatttctctttcttaaaatcaagtcactgttctccatggcacctgagtacatttgtcatttccaaaaggtccccaatcccaaggctgtctctggagcctcgttatggtcctggcttgtcaccagtgtcccctcatctgagaacacaggtggtttagctagcccactctaaatggggacagaacaggtggcctgactcatgggtcaccaggaggtgagggaacccctaagcccactccattgctctcatgtgagtcaccatagcaatgacaccgctctcccagcagtggcttctcttccttctcaggggcagaggaccgttcactccctgagtctgaggccagcaaatggggccaaacgaaactctttattttcaaattatagatttctctcctgaccacctccactgaccgctaggcagtcttcactgaaacaaaacatttccatgagggcttccagggtgtttgtggagcgtgaatgctgaaggatattaaatagttttatgagaaagggaacattcttgaagctagtaaacgcttggaaaatgctgagtcaaagtgcaacgggttccttgactcagcagaggctccagtgtgctcactacagtgggctgcgaaacagagcacatcccaacatctggcctaagaaccccgtctttttctggagcaaagctgttagtgtctgctgtaatcacttaggacccccaactctgagggttggccagaaagatgtggactgtgagcagcatttgaacttactggcctagggacaacccccctcccaaaacaaaaccacattctaacaaaaatcctgtaattgctacaaagcagttgtaattggaggttctcacggcaagggataagccaggtagcagccagggttcagtcttggctttgtgattcaatgaggtacaattctgaacttggactctagcagccacatgaaaggccaggcatggccacacttgggcctgtcaccccagcgctataagagtggatacaggacggtctctgaggctcactagctgccagcctagctctaggctcagtgagagaccccagctcaaaacaataagctggaatgtgatgatcaggctacccaaagtggatgcagagtgacagaggagggtgcccagcatcagacttgggcctccacacgcacatgtacagatgcaggtgctcacatacacatgtgtacacacaggtgcacagacacacacgtgtgtacacaccacacacccaaagtaagatggaggacaacagaggaggacacccaacatcaacctctggcctcatatgcacaaacacagatgcaggtactcacaaacaggcacacgtgcacacacacatacatgcatacatgcgtgcacatgtgcgtacacacacacacacacacgtaacagagaaaggtgagtacagccattcttcctggtcttcgatcccagtggaagggaccaagtgacaagtgttggttgtctactgatcatgttgaaaagaaaaaagaaaatagccataatgggatatacaaaaatgtcatcaggtccttctctgagggaccaagagaagccactccagatgcaggagaaaaggtggccaaacggacaccaaaggcacctggccagaagccatcaatactcagttctgcagtatgcaaagattgaactagtccgagattatcctcacatttatgtcaaagatggacccaacgtcattgacagggacccaggctgcacagccaggctctgtgggttccaaccttgctcactaactgcagtgtgaatgctgagccagaagcccgggtgggatgcagtaactgtgaccctcttgcccggcttctcactccctgagctcaattacacatgaacctcaccgctcggaggagcactgactggggaggctgaggcaggggccagcctgggctacagagtgactttcaaaaccagaccaaaaggacagaacggcaaggaaggggggggggtactgttgactgagtttcagagctcatccttgggaggtgccaacagaattcctggaagaactgtcaagagttggactgatccttgctctgtagccgaggaaatactgagaggcacgaggtcaatgctcacaaaaggttatcacataggttatgatgttctttatggagccaggagaaaaggacagaggcctcacccttcactgacgggcacgactacccaaggagcttgagtacagcctggaagtgagctggcccaacgccatcagaaggggacctaaggcttggaggaagtttgtgtaaagatacaagctattgtaccacagcctccaagctccagtggagcccaagggaacaaacttccataggctcacctcactctccaggttcatgtcctgcagccagcactgactccctgtgtggccttcaagtggtacctaaacctctctgtgctttagtttcctccaagaattgggttgagtattaaaataggcagttcaaaaaaatgttcagccaaaagctcaggccatgggtgtcaccaccacttcactttagaatttgggatcttacactggcctccaaaaaggagaattggctgggttcctaactcagattttggggagtagggtcttactaagttgcattctttgctcaatgaatagaacagtcatggatggaactcacagataaggactggctggatccatcatggcagcctgtagccaataaaggaaggaaggatggacaagtgaatagatggacaggtggatggatggatgagtagatgggtgtgtggatgagtaagcaggaggatggatggatggatggattgtgggtggatgatggatacatgaatggataagtagatggatgggcaagggtgagtgagagggcagatgatggatgtgtgggcgggtggacagacgggcagacaaatgtgaatgtagtaaatgatgggtaagcattagggtgagtgagtgagtgagtgaggaggtggatggatggacagatggatggatggtggatggacagatggatggatggtggatggacagatggatggacagatggatggatggtggatggacggatggatggatgggtggatggacagatggatggatgatggatggacagatggatggacagatggatggatggtggatggacagatggatagacaggtggatggatggtggatggacagatggatggatggtagatggacagatggatggatggatagtggatggaaagatggatggatggtggatggacagatggatggatgggtagatctatattttcctaattggaaaatacacctctatttaattaagaagcaacctgactcagtatctacagaccagtctatgtggcatgggaccatcttgtgagtctataaagatggctgcttggatatagttaactacaggtaggggggtgctggcctgtgatccccgtgcttggtagacataagcaggaggatggtgggtcccagaataggctaccctatatagctggaccctgtctcaaaagcaagaccctaaaaagcagggagtctgggttcccatgtcacacctctggctgggctagctgaggagagattatagtgacacctccctgtctcctatcacttattcgagacatgtgggatgtgactttaacctacttgcattttaatcttttttttttttaactgagacaagtactcatgtaacttgctggcttccaactctgtatgtaaatgaagatgaccttgaactcctgattcttgtctcctctgacatggagggttgcaggcatatgccaccatgtgcaatttatgctgtgctggaggtgaaacccaaggcctcattcatgttagatgagctctataccaatagagctaccatcccctggtcccttaatcttctttttaaaatatataaaaaaaaattttcttaggaaaaatgtataccgcagctacctcatgacctgcctgtccacaggtgcccttggggccataatcatagctgggtgcttgtcatagattctgattcagatctggtgtctcacactgcaggccctgttcagggctagggacggggataaacatcctcctgccttctgggttacccagactgggaggcagcacctgggatctcttcactttgcccctgctccccgtgactctcagagccatccagccttctccaggcttcatgtcacagctcttgtagctcttgccatggaacagaagctggggaaggagcggggacatgggggtaaatgagaaaccatacaaacttcatgtgacttaatccccaggatacactaaggggcctcggaccagcatcttgtactccccagttcccaacccccctgcaggcctgaggctcagtgtacctgagtctgtggaactgacctgagagggccgcatgcgtatctgctgccctgagatgaaataaaggacatggtcttggggcaggtctttggggggactccctaggtctaaagggaacagggcttggtggtcagcgtggaggaggtccttctagctttagttggaggggaaagagtagccaggagtttggagcaaaggggttggagatagaagaacctcggcaagactaaaaggaaagatggggtgagggctgaactcagcagacttcacgggcatggagtatcctcattaggtggccttaccagagtactcagagtgaggaaggaaggcggggattcagggagggtggaggagatgaagggatagatgaagggaggatgaaaagagggttggccggatggaggcaggaaaagccgggtggggacacagagagggctggacggatgagtggactgaccgataaacaggtggctaggactaggcatagtgcttggttggtatagtgattgtcatgcacaggtcctgggtactgatgcccagtactgcaggtacctatgctcagtacagtataaactgggtccagtggcacattccttgaatcccagcactcaggaggtagaaagtgaggggatcaaaagtttaaagtcatcagctacacagtgagttcaaggccaccctaggcaactgagaccctgtcttaaacaaacaaacaaaacaggcagaaggagggagaaatgggggaggagagagaggtagagggtcgcagacctgtgactatgtctgctggcagctcagaaaggttagggattagggaggggctcacaggaagcaggactggggaagggggctaagccccaactgtctgcctggaagagggggtggtgtcatcacttccaggaggagccagctgatgcagagcacttaggccctgagctgctgctgagctggaacgtgtagggaggaaatccaagtgtcagttcacttaggaaaccaggcctgaagcagcccctgccctgcactcaagcaccagctaaatgaaggatgctgaagtcaccttggtctgcacttgatgacagttaagcagtgtaagtgggcccttcctagcgcatgacacagtttaccagggagactcagggaggtcaggggtgtcccgttaacataggatctcatggtgacacttacacagatttgcagatgaagccactggacacctacaccgtttctctcctgaccccgctggcttggcgggctcattccaggccactatggcagtgcctcttccttttgtttcccagtattcactcggccctcttcctgtccacgctctaaagatcatctgaacaatcttgaaacagtagccacattacaggctccactgagtacctccaccaatgtccccctgcctcggggagaaaaccagactcctctccatgcctacaggccccagaagaggtgactctctcccacactcctcaccccattgtccactgaacccatccccatggcgggctgaactcctggacagatcctcagagctctctcttctggaaagttcctttctgacctctctgcccagagttgccagatgttaccagtgaaagcgggggtgtgcagacacactcgaacttcagaacatcagttccactttctacaagcatgcatgttcctctgttgctgcctgggatgcaggtatgagagcagctcaaggcttgtctgagggtcacaggaagcaggtgtcctacacccccagccctcttgcagactccatgccatgcttataaacaagcctgaagtgttacacacacacacacacacacacacacacacacacacacacacacacacacacacacggcaggggccttatctgtcatgctacccttgacacacagtagatgctcaataaatacccaagggtagatgtggaagccccagaggccaagtgagtagagaagccagccttccacagaggcccttggagctctggctcgcccccacccctcctgcagccgctgtcctcagagctgagcatcatctatagacaactttgcagactgcagttgccaggcactttgggaaccaggaaattggggtttggggccctgcccgccactgataagttctgtcacctcaaggaagtctgtggacggctgtgactcagcacccccatccgtggagggggaagggagggagctgccatccccccagctctgctgggctagaatgccagaatctgaaggctctccctgtgaaagggagagaatgtccactgtgttgggagggatgattctgatggccaagaaagcaatgggccctgcctcatagactccatgtggagaggtcagaactcccccaggagggcagccgatgccttcagagcacccactgttgcctgtatttgcagtctccatctcctgattatgctaaaatactaatgaccccattttagagtttgggaaactgagtcccaaggacacagaagaggacagactttgatagacactcccaaagctaagccactgaccagcagggtggctcacagagatggttggcatcaaggacaggtttttgtttgttttttcttattatgtgttttccattttttttttatgtttttggatagggtattatggagcccaaggagcttagaacttggttcatagctaagggaaaccttggacttctgatcttcccgtgtttgccctccaagggctggcacacaggtgtaccagcatgcctggattagcgatcagcccgctctggggatgttacccagtgcttctagcatggcatgcaagtgcttcaccaactcagccacatcggttccctcttcccaagtgttggttccgccacacctgatcccgccaatttctgaaggtacaaaccctttggctcaagttaaccaggaaatgccttcctgtgaggcctctttccaagactccacacagagtgagggtgcatgggtgaggacgcctctcaggaaaagtgacccgagcgggagaagggacagcttaattccctcaagaagcagatctgcacagggaggcaggaggctcgggcacatatgcagctgtctgaaaaagaatgcattttctgtcttcagcaaggcttcagagctgctgtctggcctttgtctttggagggggttgagagtgtatgacaccggccttgagtgagtcaccgagggcaaaggtctcctgagccttagtcatgccatccagcctagagtctggtttcctcccagcctggggtcagtactgtccagagaagcccacccaggccccaggatcacaccccagggtgaacaggtgcacatgggattgttgataaagtacctcgaatttcctcatcatgctcattcatggaaaaaaatactttctgagcaaaaatgtttcaaaatatattttaagcacatacataattctatttattaaacaaagccccaaacgacagagcctttgggaacctgggagcaataaagtgagtcatgctggcttcggtgactcagtgggaatgaggggattccaccgcctacgactcctcttgaaaaaaaataataatttgctttctcgacaggtgatgggagtctctgccatcagacctcgccaagaaaaccatccaacaaaacaagaaactggtttcaaaaaattttagatgtagcgctgagtaattcgatgtgggccggtgtccagcctacacccccgcaggacacagagagccgggagtggcttggccggggccaggggcctgaattaaaaaggacctaccagctaaagaattccaacaccccgtgtcacatggaggaaccttccaaaacactggatcgcgccagccttgagagtcacttggagccatggcaaccctgtctccttagccagaccacttgtgtttttgtgtccttagattttttcctgttttgcaatgttttgctgggacccccgactctgcccagggccaggggccaggggccagggttcccagtgagggcaggaacagcctgcctcccagcctgaccttccctggaaggctatgcatcttttattttgcagaacacatgggaacagaaccgtccctctggcatgacaggagaaatcactccagagctcagataaatggtactctcaggttccagatcttttccccacttggctaacccagggtccccagttttctatctttatacctcagtcaccttgtctgtaaaatgggcatagcaaggcacttttccttcagtgtgacacacacacacacacacacacacacacacacacacacacagacacacaaacacacacttactatgcacagagactatttcagaagttgagagtgcagggagaaacatcaagtccctgtttccaaggagccaaccgtcttgcgtgggaaccagtgggtcccagagacagcagacagacacaggaagccacctggaggtcgaagcatgtcaattggccaggacgacatgacactgagttagggtttgagacatgaaggtttgagcaaaacacttctcaaggaaagtagcttccaagtaatacaagacgccatgcatgtaggaataggggaggaatattacaaagccagcagcgcatgccaaggtcctggggcatgaaggagcatggagcatccgaagacagaatgaagagggtttctttgcagccaggaaaaccagggggagagatgatcagctgagatcggaggaatgggcagatgcagtctcacgggtccctgcaagtcctatgaagaattaaaaatagtacgaaactcataataatccttattatgactgccgctataaataggaccacactttccaaaacatggggctctcctaacccaagcaccctggggcccctctcctcactctttttccacctcctcagcttgtcctcctgatggggtggaaagtgccaagcctgttttagcggacagctataaaaagcatgctgaggttcccggtgccgatgaccaaaccctgctgctaagattagcccgaagctgtcaccttttctaatgagaacagcagctgggattcccctgccttggaaaacttcagccgccccaccctgcatgctgtgcctactggccaagtgtccatggagatggacacaggaccggttttggaaaaaccaactttagttacatggatctcccttgcaggcggtgaaccctcggggtcaaaagagcaagctctgcaccttgcaaattatcaaggtccccctgctagggatgacaggagccacacagccctctcagggaaacccacttcttaggggatactcagggtgcctcagaaagcctcactggtccctgagatcttggtgttggtatggaagactcggcaatgctattgtaccaacaactctgcagaactcagggctctccattgctacaacctggttcaagtccatgctttgggagacaaaggatctcagacaaatcaccccaagtctgagcttttatagaccctggagccacactgcctgaacataagtctcatcactaccaggaaccagctgtgtgaccttcatctaatggtctctgtgcttagtttcactatagaacttggagaagagtagctcatttggagggctatcattggaatcagattggctagcctgggcaaatgcttagatcagaacttggctcaagactagtgactgttgcttttgaatgtctcctggctctttgggtgaactcttgtctttgttcttcctttgcaatgtttaataacaaaaggaaagaatggtttatttggcttccgatcatgggtcagaacctgtcatttcatggatatcacagaggcaggagcctgagatagctggtcacccagctcatgcttcttgaacattctcaatgggctcagccttgtctatgtgcagatcccagcctgtgtgcttgcctcctatcttctcaactccacagaatggtgaatcacttgcatttgaccaaaagaaatcctttctcaaagaggtccagtagtctactcagggtgggacggcaaccaagctctggatgctttcatttctgctgttgtgaaaaatactctgataaaaagcaactcagaaagaattatgggtcagagcctgtcatttcatagaggtcacagaggcaggagcctgagacagctggtcacccagcatccataatcaagagcagaggagcagtgcagtcagttgcctgtttgttccttatgtgcagccagctttttttcactcctgtgcctaagggatggtgctgcccataatggctaccccccccccccgctgccaagttaggatgacattccacagacatatcagtaaacctgatctagataattcctcactaaaactctcttcccacctgtgtggtggcacacgcctttaatcccagcaatcaggaggcagaggcaggtagatctctgagttcaaggacagcctggtctgcagagtaagttctaggacagccagggctacagagtgaaaccctgtcttgaaagaccaaaccaaacaaacaaacacaaaccctcttcctaggtgattctatgttgtgacaaggtggcactaagaactaaccatcacacaatctgacctcaaagcctgggcttgggaccatgcagctaccagccccacccccctctcctaagcttgtctaactcaaacccacacacagacatgtgcctcacacaaggcatgtggccagagctctggagggccacaaagacaaccgcaggagttcaaagaccacaagctgtgatctcagggcaggcacatgacttccacatgaccccctactccagggaagggactgatgtgccagtttacggagggaagccaagccacagcctgaggctacataccgttacgggtgacggtcttgaccttgactgtctgcttaataataatggcataataataactcagcacactgagttagatgggaaatgtgccgtcatgattgttcccactggctcaccttgacttttcatagtgtggctggctctggaaaccgagagggctgcatagcagccaactgttgtcagataatacttttatacactatgaagacgtgtctctgtttacttcatctgccaaggcgccttctgattggtttaataaagagctgaatggccaatagctaggcaggagaggataggcgggacttccagtaagaaagaggaacttgggggaagaatctgagaggtgagagatttgccaggcagacacggaggaaacgggattgcagtatggaggagaggtaaccaagccacgtagcagaacacagattagtacaagtgggttagtttaacttataagagctagttgggaacaagccccagctaaggccaagctttcataattagtaagtagtctctgtgttattatttgggagctggtggtccacagaaagtccagtgacagccagtgacagcactccctcagtcattcaggaagccgctcatcaaagctattgacccgacacctggaactcgctggcagccccagcaagagggacttagtaggtaccattgtccagtcttttcttagaagtacctgtcaccacagaaggtctgtcacctacatttgtatcttattagctttctctcctcatggtgctttaaagccacatctgtcttgtcagtattcacaacaggcccgagaatagcatcctgatgctggagatgtatccaacctggagaacgcgctgttacagttccccttactcacatccactgaggcggcctagcacctcaccatgctgcgatggttaatattgtcagcttgacaagagctagaatcagctaagaggcaagtatctagctgtgtctgtgaggggtggtctagacgaggttaaatgggataggagacccaccctaactgcccgaccaaatcaagaaaagaacggggctgaacaccagcctcaggactctccatctcctgattgcagatgcagagtgaccagttgcttgtgatgggctggacccttgaactatgagccaaagcaaacccttccttcagttgttttgttaaggtagccatcactgcaaagagaaaagtaactaacccttggacccagaccaaatagaaccatgtctctacctgggttacacagtctcaataaaaaggaaatgggctgataacacactatgagaccctacggtgggatgtaccccatctgtttgtagccaggctcagagagaccaggaagcatggggacacacattctacgcaacaaaaaacatgaatgaaaatagggactcgaaaatgtgtctgtgtaagtggagagaccagcagagtcctgtgggtcagccctgcctcccgcccgcccgcccgcccctggtctgtaagagcattgcagcaggccacatgggtttgtttgtccaggttggagaatccctaacactcacttctcttcttttcctacctccccagcgacctctaagcccccagggtcaattctgatttgcccccagggtcaattctgccctcaccagaacaaactgggcaatgtgtgcaggcattccagtcatcaggactagggcagagctcagagcaccaggtgggggagtcgggggtaatgggaacatgctccattcaccatgcttatccagcaatggtatctggaaaaggacatgaccataagcccctcccacctgggggcaggctatgtggtcactttttttacttttgcttcctacctcagatgcacacccattgttcagacctcaggcttttcacagaatttgctctgctgtcccctcctgctgctgtgacagcaatggggcttcccacatctgtttgctgctctccatgtccccgctggaggctatcccacgagtcatttaatcacaagattgtaacagagacctcaacgctacccttagtgagggaggctctgccactccatctaggccccatggctgtctgctcctagacaccttgccttcgatagatgagacctggtttgtctaaggaggtccagagttcatcaaacccaacactcagatttccaaaagggcacccacattccagctcagcctcttcccattttccccatgtttctcctatgcaacaaaccccagtgtcaaagtgcccactgcacaatgacctagacacccagagcctgcttaagagcagcaaaacatcacctctcagaaataggaaaaggtcttttttaaatgtttgcctatatgagaaaaatatatcaaaacagaaacaaggttgatgagaggggacaagtttagtctccacggaaacagccaaggaccaattcaagcatgtcaccccacatcaatggtgacctgtgtggctgtgggtcactggagaggcagccagaagaacaggaagctacccaataggctgagtgtagtgtgagtctcgcttctgtctggctcagagaagcaggagaaagcgagggagcgactgacctggggtcttctccatgaacacaaccttggactcagccgtgaagttctggcccgtgaggatcatctgctggcccccgtacaccaggcagctgtccacatcttgtctctccaccatgggcagctcgtgggcagagcgctgagctgtgggcaagaggaaaagaacgccgtgacccagagaaatctgctccagagatgcagcagaaagggcagggatggaaacccgagtggggacctccaaacatcccatccttggaagagccacaagccactcaagccaatttgccctcacgacgcactatttgcttgaatccggctgtcttgactgcaggagaggcagggacatgacggattgggtctcattctcctttgtgcagaggcaggccagtccacaaccttaactccattgctcaagcttttttttaatttatacttttcaagccagactcacggcctcatgtgaacttggggtgcagccagctgaagtttgtggacaattcttactgtaagctgcaagctccaggatctgtccctaaggcttcatttttccaggggtcccccgccatcatttgttcccatcatgtttctagaacttctagaacattctatttctccctgtctttctctctaagatagatagatggtagacagacagatgatgatgatagatgcgtggatggatggatggatggatggatggatggatacatgcatgcatgcatagatagatacatagataagtagtgtgtgcgcacatgtgcatattttgcagtgctgagggtagaacccaggtccccaggcattctgggtaagcactgtacttctaagcaccagccctcgcaacctcttaggcatgctcccacctttgagcatctgtgctttcctgggctcttatccctccctcatcacctcggtcccatcagcctggcctcctctgggagattccctggtccatactcccacttctttgcccccccaactcattgtctcctctgctccttcctgcttaacccttctctggagaaaggctcaatttcagaggccgcatgggagctgttctcatccccaggagagaggggctagaggcggctaagttcaggcaggcaggtccttcctatctctgcacacacttcagggcatccacagtgaatgaaagctggggcaggacagacctaagcaacattctctgccagtaaaatatgttcaagtgctcacagcagcctgcagagagtgtggaaaacagagattcacattgagctatggactggtccccacctggctgagatggaaacccttctcctcagcaggcccagcacctgtaacaacccctcaccctttgtggaaggcaggctgcaggagacaatgaacagagtgaagcaggtgcatcaccagcgaggtgacaggggaactctagctgcagccaggtccttcctactccctgaggcccctccctctctccctccacagccctgccttcctggtgagtcagcttgagcttctggctcttgtcctagagcttagagctgggcagaaggccaggtctttccatgccagggcccccggacctccccatcccctcctcatccgggagccaggagcctgagcagcagccttgtgaggcccaggcttaaccctttccttccatgtcatggtacatatcaccccctcttcctctgtccccagggctggggagctgtactgggtagcaggtgcacttagggacttccaaggcttccacccacttcccagtgacttgcccagccctgtgatcctgatgcctggctcagtgctcaaaggcaacatggcaccccactgcctgtgggctccaggacttttgaggagccagggataaaactgctaattcctcccacatgggtgcattattaagcctgactttcagtatggaagccccttggtttttaattgagctactgctaaggcaggtttactagcagtgaaaacagcagctacagaggcggcttctcagacttgcctttgatggagtaggggtgggggtgtggtaggggctgctggtgataggatgccagcaagagccacccctcccactttacaggtggaaaacctgagtcattgctactggggaggctagccaagggcttgcagccagccaggccagggccaggctgggcgagctctccgaggggtgggagccttgccgtgaatcaccatgtactgtgcaaacacccggggctggagcagcctcctctctgcacatccccaggtctcctgcaggcagcagcagcaaccaccacatctgaaatggtacctccttccctctgaagggaatggtgtctaacaaaaacgtgaagacagcaagccagcttcctggaggtcttaatgtcacacacaaggtgaccaagccttcccaatgggattgaatgagaaagatgagcctctggctcctccccaggccctctgcacacatgtgtgcaagcccacagcgatactgaacagaaaaccagccc

SEQ ID NO: 35 - DNA, 29490 bp, Cricetulus griseus
  >scaffold_36 dna:scaffold scaffold:CHOK1GS_HDv1:scaffold_36:13274461:13303950:1
  misc_feature 17645..17744: /note="n is unknown"
  misc_feature 23673..23772: /note="n is unknown"
  misc_feature 25815..25914: /note="n is unknown"
agcagccgggagggctgtttggtttggtgaagatgccttatttccactcaggaaccggagctctcaggctccccctagaggaatgaagaggaatatcagtggggaccacaggtggaagaagtgtgtgtggctccccctggtggccatgggtggtgtgctgcagtggccagggcgggctctctaagttaaagagaaaaaatcttcaaggcttttaagaaagaagtgttacagaaacaggggaacttactgttttgggccacataccaccacaattttagtaacaagaggagcgattttaaaaagctaattccagacttcttcagaccacacattctaaaaagcccagtataacccttgcaatggcacctacattactctgccatcatttagcccattactcggaaatccttgagagagtatatagatacccaaaggatgcacactcccacctcaaggacatttatttgctcaactgtgtttatagcagcattattcataataaccagaacctggaaacaacctagatgcccctcaactgaagaatggataaagaaaacgtgatacatttacacagtagagtactactcagcagtaaaaaacaatgacatcgtgaaatttgcaggcagatggatggaactagaaaaaattcctaagtgagggaacccaaacccaggaagacaaacatggtaagtaaatgttagatataaagcaaaggataaccaacctacaatccacaaccccagagaagctaggtaaaaaaaaagaggaccctaagagggacaggcatggagagccccaggaaggggagatagataagggccaactggagggaggtagaagagagagggtggggggtgggaatatgagggatggagatgcccaagtcgggggagggacagagatgtcttgatagagggaaccattatggggtcagggagaaacctggtactagggaaattctcagaaatcctcaaggatgaccccagctaaaactagcaatagtggagagggtgcgtgacctggccttcccgtataatcagattagtgacacactaattgtcatcatagaacctactgcatccagtaactgatggaagcagatgcagtgacccacagccaagcaccgggctgagctcctggagttcagctgaagagagggaggaggggccatatgagcaaggggaggtcaaggtcatgagtgggaaaaccacagagggagctgacccaagctattgggagctcacagactgacagctggggaccctgcatgggaccaaaagtagaccctctgaaagtgggtgacagttatatggcttgatctattgtgggggtgccagctggcagtgagaccaggacataccctgggtgcgtgggctttttggagcccattccctatggtgagacgccttactcagccttgatacagaggggccggggcttggtcactcctcaacttggtatgccagactgtgttgactccccaagggagaccttgcccggaggagtggatgggaggtgggatgggggttggtgggcagcagaaagggagggagggggaactggggtgggtatgtaaaatgaaaaaatgtaatttaaaaaacccacttgaagtgtatggtgatccatagccccatccaagccctacacattaaaaagacacacacacacacacacacacacacacacacacacacacacacagagagagagagagagagagagagagagagagagagagagagagaatatcagcttatttgtccctcagaaagatcatgtgtgttaatagctttttagcacacacaaaatcctgcttgtaaaaccaacatgaagaatatggtaagttccatgacaactggggctatactacaagaccctatcaaaaaaaagaaagaaagaaagaaaggaaaaaaagagaaagaaacaggagaaaaatgttcgtgtgaattaaggggcatttctgtcagattatttggtaattattttaatttcactagatcccccagactgtgtgccctaggccctggagtccgcatattactatttggaggaactgctcttagagctcacatccaccccgatggtttgaggttccgatgtctagagctcttcctaacacaatggaacaaaactcccacccaaagacaccaaaacaaagctgaacattcagcagtccttacatgcgtgggtggcactaccagagccaaggctctgaggccctggctaaaggcaaagagaaaagtgttgctcagtgaggcactggagctggccgactggccacacctcttcccaagggggttcagaggcagcacctgaaaagcggcctgctgggaggtgttccaccactgaaatgggcaaatgttacaaataaaatcggggttttggttcttttttgtttttacttactttttcagggagtattgtgacatactcatcaccaccctgctggctataccttcctgtcttttctgttaacactgctagctagttactccacattgacttcgggatcaaggggaaattccttgggtgggagggaggcttctgtctgtggtctgccttgtgccctgattctttgctctcctacacacaacagctctctcttccgtgtgtctccagactagtactccacatacttgctgttagtattcaggcttctgtactggcctgtccttggggttctgacaggatctgccctcagctgcagccactaagaacaccacctgtgcacattcactatgttcccttttaaaagggccctgcccgcccccatcactctttctccctgtctgtctgtctatctgtctgtcatttcccccccccgcctttctgcccctctctctcttctcttctgttgctcctgtccccagaggccagtctccttctcccttcctccctttcccattcactttcctccagttaaaaacaaaaacaccctcgacccaagttctgttgcatggtgtgtttctctggcatgcccgttttgttttgtttttgttttgttttgtgttgttttaattgcaacacttgcttcaaaatgagtttgacggttgacctccatttctgtcacgaaacctctggatatctttatgtttgcattcttagttagttcacagccatcctgatttgctggagtgatcttggcctaagcaggatgctgtgagcaggagtaagtgtacacaaagcactacaccatagtgtgtggcacaaacttctggcataattgtcctgagagagagccccaactgaagagaagagtcatgcctgcatcccgactccctgggttcatgcagaggagcagcaagaaaaaccaaaatgtactgtcagtgacccccgaattcaggggtttgttttcagctccttaatctgacccagtgttcaggtatcatgagaaaggaaccagagaggatgggattagttcggatgaccgtgtgtgtgtgtgtgtgtgtgtgtgtgtgtgtgtgtgtgtgtgtgtgagagagagagagagagagagagagagagagagagagagagagagagagagaatgtgaaagagaaagagattaagctgggggtgatgacaggaatttctttttttttcccagaatttttttaaatttgaattagaaacaagattgttttacatgacaatcccagttccctctccctcccgtcctcccctaccagccccccccaactaaaaccctatctatcacatatcctttctgctccccctggagggtgaggccttccatagggtgtcatcagagtctatcgtatcctttgggataaggcctaggcccacccccatgtgtcttagctcacacacactttcaatcccagcacttggaaggcaaagacaagcagatctccatgagttcaagggcaacatagtgagaccctgtctcaaaaacaagaaacaatagcaaccaccaccaaacacagagacattaaaaattctctattcagagaggtttcaatgacttcttttaaagttgtgctcttcctggacaaaggctcttgttagatgccctcttcaacactgtgactaaacgcagtgctggtgtgggtgaaaacagttctggaaccatcccccaggtttcctattgctcaaaaccctggaacccagcaaagccccacttaaaatcatgacatccatcacctcctcggggtcgttggagtctgagacctcaggacaaaagttagtatttcttattattcatcttccaattgtacaactccaaaacaggaaacagtgtgtatgaatttaatctgcttttagttgataaagtcaaatggaagaatgttagtagctagagttcttctaaagagataaagatagtagttttctggctgtcagcagggaagcaacctcacacagaaaaagaattcattggtttctagaccaaaggtaaagaaagtcaaagacccacagagcacacgcagggtggggtgggtggcagggctccgtgattgtcctggtacagcaactctaccagcaaagactgctcgtccatccacacgcaccttccatttctaaaatacaccaaactgattttattcggggtatctcaactaaaagataaattccccagcctcctctcaactaaaagatagatctcccagcctcctctgctgactgtcacaacctgacaactaaatctgggtgagtcctttaagaaggtccggcatttctgggtgagtcctttaggagggtccggcatttgctgcttttctctctccttcgcttagctagagcctaagaagaaggtgatgccagaagacccagcagccatcttgtttttaaggatgaaaaccttgcactaaatgtgacaggacagaaagatgagcttcagtccctgacaacctcgtgaggaggcatggaaacagccttggactcccctgcttcccccgatttgtaatgtgagagactaaaccatcattagacaattcctacacggccaccagccgatacctcagcctcatcggcagaaaccatgcagagaatctcagggaacaacacaatgccaggaaaggacaaattcaggtcctttcaggaaaggtcagggatgcaagcatgtgcaggtcacagtcagacaactagaaagggatcacatcaaagctgggcataaagtctgcaagccggtgacgtcagggtgtctcagttagagacactacacatggcgtggtccctcgcctctgatgggaaggatgctcctttgtacctcttccagattacggaactcctgacgcagggcagtcttcagatccgtacactctctcccgcatctcatcgctaccagactttccttggttaagtgtgggatctagtcagaggacacaggttcttagtggaggtgtttgtgaaaactgtccccacgctgactgaaatgcacagaagcttcccagctccagcacaggaggacttggccacatgcagatgtccacatccttggcaagaggccctgggtcatctctgtgcttccaggaaccacttctcacagcatctgatcaagccaagagggctttagcagggttctccgtgcccactgcttgatcatctagtcccatgctgtacactctgaggaaggcagtcatttagcctcttcaagtctcagtgttcctgtctgaaaaatggttccagcaacaataccccctcccggggcagtcaagggagggaatcaatagagatgatttggaacatcctgagtgttcaatatatgtcattgattaatagcataattaacactattaatatcattaagttgagtacataactcgtgtgtgtgtgtgtgtgtgtgtgtaggccagatgtcaacattgcatgtcttcctcactcactctgaatcttattttttaaacatttattcatgtatttattttgtgtgttcctgtatgtttgtgtgtgtgttcaagtgtgcacatgcccacacacatgcttgagaaatgctcctgtaagaggcttattagtttcagctgtttcaatactcccatttctggccacatgaatttctgcctcccactctgaaagtcgctggtcacacctgactcttaccccatctgagttattcttcagaggctcacggttcaaactatgccatgattgactttagaatggatggaagctggggaaacacaaagtaaaattaccttacagaatagttccagtaacatcttctggcgagctcgttcataagggtcaaatggaaacagcttccttcccgggtagaggtcatccaggtactcacaagcgatgacagattcatagaccagttgaccctggctgttttccaggacaggaatctggccaaaagggtgttttgtaaagtaccactcaggcttgttcttcaggttaatgttgacaacttcatgccttaaaaagggaaaggaaaagacagacaaactagaaatgagacacatacaggaagacactcagcctggaaaacaaacagctgtaaccttcatgcttagagctgttggatgtaggaattttttgtcaaatatgtaacacgtgtgttcattctgcagaggtgttaggtgtcttccatggcttttcttttcctgtgattgaatctcaggccagacatcatctcctcagaagcagctgaggcaagatgagagccaggctgactgattccatatgcgttggccacatggctgaaagatgaaagcctgaaggcacagactcaacaggacccagacagggggatgttagttagagaacaatctgagctacacagtgagaccctgtctcaaaagcaagcattaacaaccaccaagatgcaaatgtgtattgacaggttataacagacattggtgaatgttaacagttaagatcgcaaacccgccatcaaacttgtatggtcaagctgggatcttagtcagttccttctctccgtactcagtgtccacaactgtaaggaggtaatacctgtacccatctcttggcatcactgtgatgttaaaacagcgagcatgtgtagtgtttgggggagatatagtatattaattagcatgcaatcacttttcagtcctcccctattcattattattggaggttcaaaaccaggaagttgccagaggcacaagcagtttataaagattaaaggaaacaaatagttacattcttcaaagtgggagttcccaacaagattattttacctctcccccatgcaaagagtgtatatcaatatctagggaccctttgatcttcaccctgggagtggggtaccatcctaatacataaaggtggggataacaaaataacctggaatgcacaagacagtcctctttcctctccccagcaaattcagccagtggtgctaaggttgaggaactccactctgaaaaatcagttatgggcccaggcctgtggcttaggtggtaaagtacttgcccagctacaggaagtcctggattccgtccccagcatcacacagccaggcatggtgacacactgctgtaaatccaacactgtggagggccagtcagaggaccaaaagttcaaggtcatcctcagacacacagtgagtttgtggtctgcctgagctacatcacaccctgtctccaaacaagcaacaaaaccccagaaacatttgcctcagttcctaaactataagtttgtccccaaatgagcaacatattgtattgctcttatttttctaaaaccaaacaaaaaggacaggtaaccatatagatagatttgagccagcaggaacaactgcaaatgtatgttatatacatacgaatcaatgcagtgttaacagcttttatttaaaacatctccatattggtctctctattcatgacatgaactaaaagtctaatgccaaatcctatgatgtgcttcccaagccctgagccagaggctgcagtgacacttgagttttgtgtataagacggggtcttatgtggccaaggctgacctggaacttggtatgtaagcaagagcgttcttgaacttctgatcctcctgcctcgacctcctatgttctgagatcatagggacgttcctccacacttggtttcttgctgtcactgcgtgtaaaaccggtgcctcatacacgctgagcaagcactccaacgaactcagctacatccccaacagacacttttgaatacttactgagtgccaggctctcttctagcacccaacatggcagccctccttcctctcttaaactccttttgtgtatggttgccatggggtgggagagagggggagaggaggtagaaagatggaacagatgaggaaatgatagacgtggttaagcaccataaagaaatagagcagttaatccaagctgctcagggcaaaagtaaggccgtgttggtgcagttaggaggcctcagtgagcccttactaactgtgcccctcctaaacaaacagtgggtgggtggggaccgtttcgccaacagcatcattcagttttggctgcctcgtctaaaagttcatgaaaatctgatttggaaaagaactcagcatttcagtaaagcctacacaaaatcagtccttggagtcactcgcctcagaagaaagggaagaggagcccttctaggagcccaagactttaaataagtccctgcagatgaggggtgagcaacgtgctcagggagcacttggccttggtttctcacctgatgcctttggccttgaggaccaggcgtgccctttgcgagtaggggcagaacctcatgctgtagattcggatgacaccctcagggactggccctgggggactgctgcctgcagggcggggcaggggtgaaaagatggagatctggttagccctgtggggaggggccttgctcacctcatgggcattgcagaggactctgtgaactgagcctctcaagttccagaggggacacttgcacatagtttgtgcaggggatgagccgtccaagtcggttacaggcttagttactcctgtccagagagggcagccccatcaggcctctcccccagtctaaggttacaaaagtctcgaaggtttacctctccccaagcttctggtcgcatccccagacatcagtctccatagagtctacgcagtacccaaaagctcacagtcgccgccttgtggctctctctgctgctgctggctccacgtacagctgggctccctccagacccaaattgaatttctcaacagtcaacagcactctggtggggcagagaggaagtgaactgggacccctggggtgggagctaggataatctagccccctcccagtcaccgccccagacgtggaagtccataaaggggcgagggaaacaataaatcccaaaccactccccccaaagtgcttcctgttttaagacacaagggggaaagcatgggggatggtgctcacccacacgaagaagactggacatttaaacccccacgtagatttcaaaggcatcgaataaaaatttaccgatcttaactttttaaaatgtactaatgttaacttttcctttccatcacacatctttgttttaagctgataattggccagaccttccgtataacgtgttcggctaaaaaggccaaactctctcacggtttggcaaatgggacgaaagacttagggtgtggtgagaccctgcatcactcagaaagcgaatggcaggcagcttcagtccctgaccatctatttgtgagatttctacccatgttctgaaaagctggcagtgaataagaatgagaccctaaaggccaagagtcgcttctgagacctccagcctgactttccccggaagtgttatagtttccaaggacagagctcaacaacgcagctccagctcccgtctacaagagactaggaggcagcgggccttgactctgacactttaagctgagagcctgaattccagcaggggaaataaggattcctttaacttcccaggctgagatgacgtggaaatggctggcaaatgcattttatggagtgacaggaaggacagaaaagcattgcgtgtctcatttcccaaacgtccgtgtcatgtcttcaacactattactcttttacaaaagtgcctcagaaaagtgaaataatttggccaaagtgaacagttaatagaatcaaagaattttaaaaatccaaagactgggctgcaacagcagagagtttatgtctggaaaaacatacagcgcataatggcagcttcattgctgggtctgatttctcattaaaatagcagacctttgtcatagggcttagaagatggacagttctgggcctttggaattctcacctctccagaatgtcttggctaataatagtattttttctacagaataagaatctttgaaatcttcagaacaaattcaaccacagttttagtcaagaatccagtgattctgtgagagttaagcctaaatgccaaactccatagctcccataaaggaatcagggaattcctcgtccatagctcccataaaggagtcagggaattcctcgtccatagctcctataagggagtcagggaatgcctcgtccatagctcctataaaggagtcagggaatgcctcgtccatagctcccataaaggaatcagggaatgcctcgtccatagctcccataaaggaatcagggaatgcctcgtccatagctcccataagggaatcagggaatgcctcgtccatagctcctataagggagtcagggaatgcctcgtccatagctcctataagggagtcagtgaatgcctcgtccatagctcctataagggagtcagggaatgcctcgtccatagctcctataagggagtcagggaattcctcgtccatagctcctataagggagtcagggaattcctcgtccatagctcctataagggagtcagggaatgcctcatccatagctcccataaaggaattaggaatggtggggagcaggggttggggggaggcctggatcaatgcttggaagtacgtaggtgccacagaaacctagtaacggttaaggcagaccccgccttgccttgctgatgctttcactttggcagatgcagtcacaggcaactacttccctggaactaacttggatcaaggacaagcttgagggtaaaacagaaacaaggggcaaaccaagctgtgctaagtaaggcggggtaaggagccggcttctgagcaaacaaaggtaccttaggtctcaaactcaggaccaaggactgaggacctattaggactaaagaggatgctgaccaccaggttcctgaatgcctcagtcccttcctgttgcagggtcctggctggcatcccctgccctctaccagcccaggactctcctttccccacatggcccaactcagtcttccagttacatccactctgagctctcccagatgtttctcctccactgtattcttcctgacatctataataaaaacctcaactccctaaagagctgtcatgtccttctttttcttttctcttttcattcaccttgcacataaagaaagcaggtgattgaggaaaacactcccagattctttttttgttgttgttgttgttttgtttttttgtttttcgagccagggtttctctgtggctttggaggctgtcctggaactagctcttgtagaccaggctggtctcgaactcacagagatccgcctgcctctgcctcccgagtgctgggattaaaggcgtgcgccaccaacgcccggccactcccagattctaaaagggaaggcataagagaaaggcagactttcaaaatcaaaatggattattactgacctgtttggtgctttatagttcatttaacccttaaactggccctgtaagtagtcctataggacttattatcccgttcaaaagatgagtgagtgctaacaagcacttgttaaatggtaactggaagagaggagaagaattttaactctgaggacatcattctaatccagtagcttagtcagtagcagatgccgtggaatggacagtcagaaaacttctccccatggagtgaatactgaaggcttttcacatctcatctgctcagttcttaccatgaatgggcacagctgtgcaccaataaacccttacttatggtctctgagcttgatatatgttttaatagcctataacttttagagctgctttaggttcacagcactataaagcataacagagaggcagctcatattcccgcaagctccgcacacagcctcctgtactgttaacattccatcagagcggtgtctttgttacgatacatgtacatacattgacacgtcactccaagtccacaatttacaaaccgtccacggtggctcacttttgtgtgatttctacattacgacttatgatttatattttgatatttccagctacttaaaacggttacttttttgaaaagattcttagctctttgagctgcacagaattcagcagttggcctgagttagcctgagtggttttaatttggtcattcatagcttttgttgcaatggctgagctaaaaatagaatgagaattccatttgcaaattaagagattctattatgccagaaaaggctgtatttccaattttccctcatgattctctccttctaaataaaactaaatgtgagagctggaaatgtcatttattaagaaagctgtggtggtacagtctgaggcaccatggcgaatctgaggtgaatcagagttacatagtgatcctgtctcaaaagaaaaaaaaaagtatgcctgtatatggaaggtcaagttttgagatacaagtccatttagtatggctaggacagcggtgggaagcattcttcatctatgggaagcagtgaaatgtcagaattctcgaaacgggagctggaaccacctgggctgtgtgacctgctttctggcacttgggcaaaatccccagcctttttgatctccactttccttgtttaagatgatggtaggtacatgatggttttgagtatggaatgaaaccatgcagacctcagagttttagctcaatgtacctcaaagttaaagagaaatactaatgaataagcatgcattttagtagcacacatggtaccttcccattttgcatctatacagaagacaggcatcacaattgagctttgtcaggtgtatcagagtgaaaatctaactcacaacactcattttgctggtttgctggctgaatgtgttgaatgctgcagggtacatttcaggaatgtgatttttaatctcagcaaagatcatgacagttttcccggaaggattttaattatgacctttaagcttgttctccacttcttcgtaaagattcagaaggtagctgctaaatatgtttttgcaaatgttctatgctatttcatgttcacatcactattatattgaccaactcaagcgcaaaataattataataaggtcatagaaacctattccaaaaaagtttccacgcatctgaaatataatcatatccactgtttgtgtgtgtgtggaggtgcatttgcacacgtgtaaacacgtatgtggaggccagaggtcttttgagtcaagatctcacagggtctcacagttggaacttgttgatttggctgagctggctggcctgaaatccaaaggtccacctctgcctccccagaacagggttacaatacacctagcctgtacatggcttctgggctggaagtcaggttcttatgtttgctctataagcaccttacctgcccagccatctccatctccccagccacagatatgcttttgtgaaccaggaacacaggactctttgatcatgatgatcaaagatttacatgtttacagaatggaaataatttctgtactctatttcagttcgttttgagggaaatgagtttttcttctctctgtctctgtctctgtctctgtctctctctgtgtgtgtgtgtgtgtgtgtgtgtgtgtgtgtgtgtgtgtgtgtgtgtgtgtgtgtgtgtgtgtgtgtgtgtgtgctgtgcgcatacacatacaggcgtgtatttattttgtttttttgacacagggtctcactatataactctgactgttatgaaagtccacaggtagaccgaactggcctcaaacttacagagatccacctgcctctgcctccaaagtgctgggattaaagatgtgcaccactatacctggcttgaggtaaaaaacaaaaaagtcactccagtctctattattagcagaaactatattcctctatttcagaaattgtattcctctattttgaagcccacatgacatgagaggttacattgctgggtgttccattactgtccactgaattcctggagtcagaagagggagagggctctattctcacaactgcttttcttccaggtttgcaggaagagaggactacagggagtctcctgtcccggtgaagctgactttgggaaacattaaaccaggttactgaagttaccccaggaggacctttcccttccaattaaggaaaacggagtggaaggggactttctttaaagtacttctgtttccctattcctatttatctttacaacatggagcacatttatacaacttgataatgtttgaataatcaaaaccaaaatttcaatattctgacataaagtttgtaaactcaagcaaaatcatcaacagctcctgctaaaaccaaaccatgctagtggcgttaccaaataggtggatctgaatcaaaccattccccagtatccatccagaattacttccagggccctctatgaatgccaaattccatggcaactcaaaaactttatataaaaagaggtagagtatgcaaataatctaaccacatccgcccatagccatcaaatcacttctagattacttgaaaggcctcccagaagtttccaacttttccaacaactttccaatacagttgttacattgtattgcttagggaatattgacatgagaagttgaacatactctacctatgcaatctttctattctattctaaggtagtcaattggagaatgtggaatcctctgataggaatagatcatattagtctgtcttggcttaatctctaaatgtaagagctgttgagtaagagcttttagatgtgtatactcttatctcaagagcagccttaactttatgaacacaggctacatttgagtcacttcagcactcaatagctgcattgccctgggcaaataacagaagtttcctacaccctgacatcctaatgccctgtaattctagaagagtaccatatggttgagaaattttatttggatcagtatggtaaacatttaatacttaccatgtgtctgccatctagcaagttttttacattagttgctattgtgtttactattatttaagtgtagtagggaagaaatgaaattcccacctgcttgtgtcctcatcagaaaacataaaacaattaatgccaagctgaaggcaagaacttatcttgtgaaatagtatttgccagtcttcacccaaacacgaaaataaaaacaactttggttacaagtgtctggcttaaagaccccatctttgttcttagattattaatttttttttctattttgttttggtttgggttttgcactttctctgtgtagccctggctattctggtgctctctccctctgtagaccaaactaacatcgaatttacaaaagacccactatctctgccgcctgggttctgggattaaaggcttgcaccgtctccaccaccacccgattcttttgttttttttaattatttctttgccctagttctatgttctaagttccctctgcccctaccctgctttttgtggaaatttaagaaaatgaaatataacctacggttaaatatttgggttttcttttaaatagaaagtgcaaaatttaaagttggcaatcatttcctgacaggccaaacttaataagctcccaaagttcagaattgacctcaaaatcctcttcccttccaacaagatgcaggcgagcctggacccccagcggcggaggcagaggaggggccccgaggaaccctccaatggttactgctctggttgggtagagccgggagacagacgtgaaggacccaccccttctcgcgcggatcttctctgcaattggccaccgagccctgagttccagccaataccagacgcgtttgggggagcgagccaatgggcggccgcgttgccgccgctagctggagagaggcggcccggcctgatgtctgtggctacggaaagaggcagtggggtgcaggcggtgcacctcagcatctggtcccctcacatcctcctggaaggccgcgagcagccgcagggtctggcagtggcctgcggcacaggggccccgcccggagcgagcccgctggtcgtcccgtttgtgaagtcagccggctccccagggtgcagccccacctcactgtgaggctaaggctgcgacgctgagcgatgggtgattgttatgcgctcttaagaacgaatcaccccgacattctccctggcaaccctgaaaacacgtcagaaaaccaggcgattgggtgggtctccttggtaaggtcgtccgggatgcgttttccagatccttctgccatcaccttagagcctcacttaacctcagaagcagccacaaatgcaatggggctcccagactgccttctcctatggaggtgatttcatgggaaaagtaggaggattaacctttctcagtggaagtatgtcaccctttgcttatccagtgttcagttctgaaccggctggtgtggccttgacggcatggcatatgagacacctatttgtctactgtggggtttgcaaggagttagaaatcaccagagagatgactcagtggtgattaagagtgtttggtgctcttccagaggaatattggggtcccatcacccatggcctctgccagtaacacctgttccagagctctttaactctcccctactccctaagcccacccctgcaggcacccgcacacaatctttatcttttcttccttccttccttccttccttccttccttcctttctttctttcttcctttttaaatgaaattggaagctgggagctcaagtaggaggttatgcagtcatgtcgattttaggttgcttgaattcagtattcaatggtcacaacaaaaatatgaaactcagtgatggaaagaatggggaattcccagtttttaatttataaataagacatcaaaaacttgacattttcttgaaatcaggagatgtaggtgaagtctggatcaaacgagagaagatggtcggccggttttcagtgaagagtgttaggacaactagagttggttatggtgaaatagaaacactgcagtagtcaggcctggaggaaacacaaggaagccatggggtgagactaaagggggaatgaaggaaccggcttcccttttggcagccataatggtcgaacatgtgcttctatgaccttgacctagacattagaaagtcagatgcctgtctcgtgacagggagccaatcggaagttagctggtggcgctatgctttacaaccctgggtgtgctttacggacaagcgcacagcaatgacgtagagagcatagcaaccaccctgggagggcctatgagccataacaaccagttgaccaatcaacacagggcaagccctccaagcctggaggcacaccaatcgtgagcctgtgcgtacccctagacactccccttacgctgccctataagatcttttgggannnnnnnnnnnnnnnnnnnnnnnnnnnnnnnnnnnnnnnnnnnnnnnnnnnnnnnnnnnnnnnnnnnnnnnnnnnnnnnnnnnnnnnnnnnnnnnnnnnntatggggttagctcgtaaaactacaataaagcctcatgcagtttgcatcaagctttcgcctccattctgtgtttggggtgactgcggtcctggactaagattctgaaagcctcagctttctgagggtctaacaagaccagtgagaagtgaggcagtgagaatactgggtgaagtgcaagcttgttattcactgaggacgcctgcccttcagagcccatagtcacaggcctcagggctgtcctgtaggtagagatttacgaaaccacgataggtcttggcatcaattaagtgcgatgatactgtggggtctttctgcatggcagccatccagcccttcagttttggagtgtgggccacacacctgtggggagacaagatgagagatgtgaactagatgagtgagatgggcatccatcccagagtatcaaattaccactgcagtttatcctcctaaacttttaaaacgtgtcttaaaaacatttcaaatgaaaacagtaggctttagatctgaaagctatcatcaacgtctttgtttccagaagaggaagccaaggtacagtgaatgacttggtcaggtagtagaacttcggattgacagacacctaggtggaaaatacagattttctgtgtgaaataggagtagaagtagccccagatagctgtgatttctaagatattacagacttctaagtaagccagtgtcaccaaccagcaaactcaaatcaggaatatagaaagcaatgtggaaaccttacaagtaggtggaacgtaagaagtggtctactcttaagaaaatctacaccccgtggacttttaaccacagagagcaaattttaaaaggctccagtcatgtcacagagagatgtctcctgatccccaggtccgagcctgagcatgaataccacaaaacgacaggttctgcacacccacgactttcctctctgctggttctcattcatgccagtaatgttaagtatttatcatagctcacaaaaattccaaatgtataaaatattacaactatcatcccaaattacacataaaatattcaaatgtcttactctttgagctctagtgcttccagccattgaaaccaaggccacatgagataatcagtcatagagacagcatccccaacacggaagtctttcttatacttagtcacagcctagatggtaaagaaggaaaaacaagtatatttgtgcatctggaaaatagtcgtcaaataaccatcatcaaaataacagaggcatattaggtagagctagtctaagttgcttttatcctgttatagtcaagttaggcttttatgtgtttaaaaaccatctacaactcatcatttctaattggaaatctaacacatggtacaccaatagtttcagccttcctgatgctaccaccctttaatacaatttctcatgtgctggtgatcacaaccataaagttatttcgttgctactccatagttgtaattttcctcctgttatgaatcttaatgtaaatatctgtgttttctgatggtcttaggtgacccctgagaaagggttgttcaactgaaaaggggtcacaactcacaggctgagaaccattgtagtatacagttattttaggaacataaaggtccttgtgctcacagacagcactagggaaacaggaatactaaacaggcagggttgcttttcaaagttagagatgtataaactgttctgtccacaaggctaggagtggaggtgtctaacacccttacctttcccccagctatatgtggggccaagccatacctggctacctaaaagctcccacaaccataattggaaatgcctcatagtataggtgacctttgtgttatctgtatagtcaagggctcccctaagctcccacaaccaggaccagaggtggctgtaagcccgggtgacctatatcctatctgtatgaccaagaccacaccagatcctcccctaggcctgtgagataacacatgtcacctatctctacagcccatctcatggacatgcactttgagaagagtttccttgtaactgtgcctgttcttcacagaggttgtactgtacttaaatatgcctaaaatagacagcctggtgtcagacctagaagtttgaaccaatagggactcctgattcatgctgaaccagatttccttcttgtttcacccaaatgttactctagcaaccctggtgttcacagagacccccacactggtgtaactgcagcactgtttggaatagctcaactgtgagcactgctacatgtccagagtacagtaaagaatttttattactatcaaaacttacaacactggacagcaaataggaaggaactgtgcatagtgtataatatcttaaaacactacagcagtataagaagatattaaaacatgtgcattatacagctgcatttgtgtaaagtaagaggcaacccaaacttcatacttgggtcttacttggtaccatgatgtgtttattttttaaaaggtgtcatgctgtgctgttatgcattgggtgcttctctgaatgtaaatttttagttaaagcatgcttaaagtatcctagaaatggagagatacacattaaacaggggacaattgtttgaataatactaaattcaaatgggaagtttctgaagttacaagggtgagttggtactaggttcaccaaagtcagaaattgagaatatatgttaattaaatgtatccttgttggagggagggagggtaaatatgactaaaattcgtaatctgcatatatgacacaggaaaagaacttttgaagaccagaaccaagccaattctcctattatgaatgacctctgtaatcttcctcagggactgtgtaatgttacacagcataaaggaattgttcatgtctctttatttgtctattcaccactaaaataagaacctgaagaaagaggactgcatctttctagcttcccttcagtccctcagaaaaccacaaactagcaaaaactgatttaagagcaaacattaaaccccacaatgcattgccagtaaagaaatggactgcacagcacagtggcacaaatgaaaacgccctgttaaattgtctttgggttatacaaataagggagttacccagcccactttaggagattagaataccatgatatcagacccaaagaaagatatcagaatagtgaattgtgggtcaaacccgagagcacatagagaaaaatcctttatgaagtgaatagtctataacatatatgaaagtccactgagcaggatgccatcccctgtaagacaacttcggaaaaccatggagctagcctggcatgaggcatgggtgttttgggtcagagtccctcctagctcctgggcactgagagaccacggcactccctcaggcagggaagtgtccaggctgctttgtgtttctctgtgtgttccctcccaagtcaaggaagctagtgtggacacttcacaggacaaaagctcttaagatatttatcttgtgtaacctgtgtagcttgcaaacatcattgtatcctagcaactactgctgttttagtcccagcagttgccatatattctgtttcttataaagatatgaaaagtctgattgatcattacaaattgccagagcttaagttttgctgtggaccctccaaggcctgggttagttcttcgaggttatttcaggtaaccttggccaggtcagtaaacgtgggtgcttacagaccacaagtatcaggttagaggaaaagggttctgtgaacatttctatagatgtagcagatgccagaaagattcagtactcacaaggaaagaattagattagggttgcagagatggttcacaggttaccggcatggactgcttttctagagacttgggttcccagcacccaagtcaggtggctcacacctgcccataactcccgatccaggggattaaaaggtatggctgcaccacctgcactgtcccttcacatacacataattaaaataataaaataaagtcctaaaaatagcaacttaatagcaggatatagtgaaaaaaccttcaggaaaaaaaaaaaaaactagaacacactccatgctcagggataaatgctaggatgtgtcccctcagtaaaatttgaggccaagttgtgaacaactgtatcaagactgggaagaaagttttatctcaatgccccaaaaggaaagaaacctgggcatcctggcgtgtctgcattcctggaagacttcttctgggaaaggtttatgacatcctcagcagggaaaagcaatacagtggcaccggttgtctaatgacaatgattactttgaatatataaacatatactggaaacaagtatggaaaaatggtatttcggaaataatttaaagctgatgtactaaatacctcaagcctctaaaccatgtggtcatgcactcttgtaagattagtactcaggtgtctgaggcaggaggatcatgagtttaaggccagtatgggcagcatagtgggtttgaggctagcctgggatacagtatcacctgtatcaaaatactaaataaaaataaaaacaagtcatgatagtacttttaggtgttttgatttatatcaggagtagaactgcttacagaaatctattgtgatttgtttttatttggtgctatttctaacagactatgatttggagagggagcctatgaagggaggaggataagaaaagaaatgtagacaggaattatcatctattgtggtgaaagcaaagagagtgagtacctcctccagcttgtagaattccttcgtcaattcttcctttagcgcagggtggtcttccttcttccccctaacaaaccttgtaaccaaaaggggcacctggacaggaaatgattttttagtttgtcagtgtgaggctagtgcacgcccccaacacacacacacacacacacacacacacacacacacacacacacacacacacacaccacacacacacacacacagagagagagagagagagagagagagagagagagagagagagagaaacccagacatcctggcccccagaacacacacacaaacataacagagccctcatagtcctggtacacctccagagtgctgtagagacaagtgtggaccaagtcccactgtttaaagcctgatcttacaaaccttgttgtggactaggatttgagatagtgcagagtttgtgatttgcaaaaaatggaacccaatctggcaaatttgaccagatgtttcataaaaagacaccaagtggcctagaactggacaaataggccaggaaatatgggaactttgtaataccacattgagaaatagactaaccaaaggtaccagctgctgccaggactaaggaacactaatgggaatttgtactgctgcacactgggaaaactaaacaccactgctcccctagaattcaatcctgcagccaccaccaccccacaactagaagctctgccacctgttttgctggcaccagccatccacacaaggcctgtttcttcacacagcccttatcgcagctgaaggctactgtgcctacctaacaggaagggcctaggccacagtcatagccccagctgcaaagggagctggggatgagcagttttttgtatcctatcttagaacttcagaagactattcaaagggcctggatttcctgaagacttgatgggtgtggtgtgcaacctgtcaatgagtgtggctggagaggtgagtttgatatttagctcttcaagatgaagaaagccacccagagtctcatgaaatcccatcaatgttggtcagctctgctaatactaatttgaattaatccactctgaccataaataagatgaaagtgcattcttccccagaaacctcagtgcattgtcactgctaaagaccggccatggcaattaagagctaacacactaggtaggcacnnnnnnnnnnnnnnnnnnnnnnnnnnnnnnnnnnnnnnnnnnnnnnnnnnnnnnnnnnnnnnnnnnnnnnnnnnnnnnnnnnnnnnnnnnnnnnnnnnnnatcacagtgtgcagggaggctcttattagaggaggtggtaccttcagatagtccatgtaactgctccctgcgctcacagttggatgtcgaacccgggaaacttttcctggagcagtaacatctcagacacgccatatctgttgcatgttctctatcaagagcatctttcatcctaagggtacaggcgtgttgactgttgtctcaaataccagcattcatgtgtgttcttggtccttaacgcctaggacccacctttcattttcaaagtgtaattcccagagatgagcagtattctacagcagagggttttgtttttcccttagcagcagggctgtatgttagttatttttctgtcagtacatgaacattttagcacgcacacacacacacacacacatacctttttacacatatgcacacacaaatgtaagatcatacttcagtgttcactctggttatttgtttttgtgtaggattgtgttgttaaccctgagaattaagtctcttgaaggtgaagacacaggaaacaggaggtgttaggatgtcttgcttttgagtgaatggtcccactggacactgttccagatttgagtttacagcctatgctttaatggttataacactactttctctctgcaagatacaggtgtctacaatgacaatccaatttagcctggctccagtggattctttatttattctgtactttaaaaattattttatttgtgtgtgtgtgtgtgtgtgtgtgtgagagagagagagagagagagagagagagagacaaagagagagagacagtgagattatgagtaccatgtgctggcaggattccatagaacaaaggatgacattggatccccgagacctggggatcagattgttttgtaaatcctgatatgagtcctgggaactgaacccaaatcctatgtaagaacagcaagtgtccttaaccactgagctctctgtccagccccatactttttaaaaacccctttgaaagaaaacaatcagtacatgtggacttcatcggattcattttctgagattttttaaaaaattgtgtaagatttcaaaattcatgttagcaaaatgagttttttttttcctgttgattctaatattctgagtgggtatgagcacaacctaattagttgccgcctatcagggtccataagataccagtatgaccatgtcctttgtagcactgtttgcaacagtgtgatgctgatggccttgaaagatgatcagttaaagaaaagatgctttagaagtcatagtgtcccacttttttttctttcctgagacagggtttctctgtagctttggagcctgtcctggcactcgctctggagaccaggctggtctcgaactcacaatggtccatccacctgcctctgctgggattaaagacttgtgccgccaccactgagtgtcccacctttaaatagctggagagtctacattatgtgacaaagatggatcctgggaaatcaagtaaaacaagtcatacacaaaagtcatgactgattcacgtgctgagggccttggaaccaagttcttaacctgaaaattcagcagggtgaagacagaggcagaaactctctccctaaatccccatctcatcagctaagtagacaggagaaccattcaacactggctcaggaaaacagaacctgccttgctcttatcaatagtcttgtgtgtttcagacatgaaatcgtcaatatcaacctgaaaaacaagcccgagtggttcctcaagaagaatcccactgggctggtaccagttctggaggacagtaagggtcgcttgatctccgaatctgtcatcatttgtgagtacctggatgaggcctaccctgacaagaagctgttcccagatgacccttatgagaaagctcggcagaagatgaccttagagtcattctccaaggtgtgtgtaagaaattccatctcgggtttgatttaggctaagtcagcaggggacactgacagaggactctgctcctcgctgtgcctaggccctcatgctctgctctctgcnnnnnnnnnnnnnnnnnnnnnnnnnnnnnnnnnnnnnnnnnnnnnnnnnnnnnnnnnnnnnnnnnnnnnnnnnnnnnnnnnnnnnnnnnnnnnnnnnnnngcagagagcagagcatgagggcctaggcacagcgaggagcagagtcctctgtcagtgtcccctgctgacttagcctaaatcaaacccgagatggaatttcttacacacaccttggagaatgactctaaggtcatcttctgccgagctttctcataagggtcatctgggaacagcttcttgtcagggtaggcctcatccaagtactcacaaatgatgacagattcggagatcaagcgacccttactgtcctccagaactggtaccagcccagtgggattcttcttgaggaaccattcgggcttgtttttcaggttgatgttgacgatttcatgtctgaaacacacaagactattgataagagcaaggcaggttctgttttcctgagtcagtgttgcttggttctcctgtctacttagctgacaagactcagatttagggaatgatctgcctctgtcttcaccctgctgacttttcagtttaagaacttggttccaaggccctcagcaagtgaatcagacagtgctcgcttttgggtctgatttatttcacttaagatacccaggatccatctttgtcacataatgtagactttccttcattttaaaggtgggatactggatagtggtgctatacacctttaatcctagcacagacaggcagacctctgtgagttcgagaccagcctggtctacagagcgagtgccaggacaggctccaaagctacactgagaaaccctgtctcaggttaaaatgggacactacttacttctacagcaccttttctgtattcattttttcaagccatcagcataacactgttgtgaacagtgctacaatgaacatggtcatataggtgttttggaccctgataagaagcaaccaattaggttgtgctcataccactcagaatattctaatcaacctgacaaaatattattttcattttgattcagttcaaaatgacttgtttgattcaataattcattttgataatattaatattgaaatacaatgatttttttaggaccaaaaatctcataaaatgaatctgattatgtccacatgtactgatatgttttctttcaaaagtgtttttaaaaaatatggggctggagagaggacccagtggctaaggacacttgctgctcttctagactgtttgggttcatttcccagaacccatttcaaggtttataactgtctgaaccccaggtcacggggatcaaatgccatcttttgttctatgggatcctgcaagtaaattcacacacacacacacatacacataaacacacacacacacacacacacacacacacagacagacacacacacaaaattaaagtacagaataaataaaccgcaggaatcaggcttaatccaaaagacagatttagttcatggacttaacaacataatctttcacaaaaacaaataaccagagtgaacactgaagtatgatcttacacttgtgtgtgcatatgtgtaaaaaggtatatgtgtgtgttaaaaggttcatttactggaagaataataactaacatacagcccaactgctaagggaaaaaacaaaaccctctgctgtagaatactgctcatctctgggaattatactttgaaaatgaaaggtgggtcctaggctttaaggaccaagaacacacatgaatgctggtattttgagacaacagtcaacacacctctttatagagaacatgcaacagatatggcgtgtctgagatgttactgttccaggaaaagtttcccgggttcgacatccaactgtgagcgcagggagcagttacatggactatctgaaggtaccacctcctctaataagagcctctctgcatactgtaatgataaaatcatttcaattttgccttagaaaactactggagagaaatgggcttctttctgcccagagttgcaggggaaaacacataacacaaggcactgtgtccctgaatcgtcctgtgccctgatctcaggctttcccattgcatgaggacagtaaatacctttatttttcaattcagttgagattcttagtgataatagaaattccgtgtaatgcagaaaaatttgcttcagataaatattaacaaaaaattctttagtgttcagaaccacactctctcatctgaatgaaatcaaaattgttatgaagtgatagttaattttaatatactttttaggatacatctttacatttatgaaaagacctgcctgcctagcctgttctccccatggactagaattagtttacaaaagttaactatatacacgaacatgttcttaagagtggtatccaggcagcaggtgtctaataagtattctcagagaaaagccaagttgtagattaactgtaggtcaatgacccatagtctcgacaacaaggctttgcaaggagacttttagatgcacacttcccctttgattttgaaagagcccaacccatgaaagttgtgcccatgaaagctgactcagaactttgtttgctgggtcaaattctctgacctttgcctccagggaccagagaggagacaccctcctcggtgttcagagatcttgtgcaaaccactaactgtacagaagaaacaggttgtccaagacacggaatgtttgaacaggctgccctagggccctagagaacgctacaattctcccctcgaaaagagggtgtggaacttaagattgacaaaaggctgagacttttttcccaaaacacaaaaccaacgctcctagggtctggcaagccctgccaccagctctgagtagccatgcaggcatcgcccttgtcctcaccggattcccttggccttcaggaccatcagtgccctctgagcgaaggggcagaacctcatgctgtagatgcggatcaggccctcaggaaccggacccggaggcgagcttcctgcaggagagaagaggcggtcatggcccagatcacagggagatcggggacatcccagacatccccggtccccggagccagcctgccgaggaaagcgtcacctttccccaggctcctggaggatgccccggacatggttgagctgtgcaggccgagacacaggacagttgcactctagtttgcaggcgactcaggaagcatgtggcctcgccttgtctaaaggcttgtgttcagccccgcccagaccgcgccccctagcccggagatgccccgcccccaaaagatcagtgcttaaaataggaattctattagaatcactagagtgctgtgcaggccacctggagattcgccaatgctgagacgttcagagtcaccccatccctccttgcctgtttgccttcacaaaaagactctggtcatgacctctctacctcctatatgtactgtatgtactgtggtcatgacttctctacctcctatatgtactgcctggacaccaggtcttctgggctgagaccataggctgtgacccttgactctgtgaccctgggctgtgacctgtcgcccctagtctctgctctagctctgtcccacggtttccaagacttggttgctgtggcctggtctcaatattctgactgtgtggaggtggtctatgctcc

SEQ ID NO: 36 - DNA, 53974 bp, Cricetulus griseus
  >scaffold_36 dna:scaffold scaffold:CHOK1GS_HDv1:scaffold_36:4881585:4935558:1
  misc_feature 12862..12961: /note="n is unknown"
  misc_feature 46494..46593: /note="n is unknown"
  misc_feature 51720..51819: /note="n is unknown"
aaagtggtgtgcagggggcacttggacagagtccactaattccagctcccaggcccctcagctgggtcagcagctggcttggggaaaatggaggtgtggatgtttgattttctcagtggtaaacacagcccttgttgtcacttagggctgaacagggtaaggtgcgtgaaagtgccttgaaactatcaagttcaaaacaaatgcagccttctttccttgttagctcctgccacctacaggccaggagcctcatcgggtcagtgcacactccccaggtcaagggcaagctggagttcaggtcggctgggatgggattccccatgaatcagcctcctggtgtgcgcttcctccacacaccaccctctgagcaaatgccgcctttaatgctgaatccaggagatggcccactcatctctctacttacttctggggaagctggtgcattagccatgagttcccctaacccctcaacaaaggcagctctgtgcctggctttatctagcatcttctgtgactccttggaaaagaccagagtgggaaataaaccagagaacgcttaaggcagagtaggagtcttagcatatcaagctcattttagggcacaattcctgcaccctacagctgaccgaaggccatccaaggactatgacagtggcaggatgctctgcaggagaacacacttcattcggaacaacctgaacaggcacaggtggagaagcggggctatcgggatggttcggcagacaaaaggtgacctgagttccatccctggactccacacggtgggaaggaaaaactgactacagcaagtagtcgtctgatcctcacacacagaccacggtacgagcatgcaggcgtacacacatgcacaggtcgctccctgccacacatgcattgtaatgtaaaaaccccaacaatttctagaaagacggccgtgtctcaaacacacggtgactcctatattctagctgccattaggtcattcccagtaatgagcaaaaccaaaccagcaagcgtcttttgtaagacaaaagggtaggcgagaaggttaaatgggaaatcaaaggcctctgcttccataacatagaacctgaaacactacctcactattttaaaaagtacttattaatttatttggttaaaaaaaggaacaagactaaagaataaagacacacatgctgtaaagacaatagtgcatggttccaaaaagtacctaaaaattgaattgcaaatgatgtacagttcttcatccctggtaaatatcccagaagagtgacaggaacaatttccctccccaaacctgaccctaaagtgaactcttcaaaaatttaaaaattataagtgtgtgtgtgtgtgtgtgtgtgtgtgtgtgtgtgtgtgtgtgtgtgtagggcagaggacaacttgtaggaactgattctctccctgtatgtgtttctcaaggactgaactcagctcatcagacttggtgacaaacacctttacccactaagcctgctcattaactgtgaacttttattttttttaaaggaagccaaatctccccatgttgctgatttgggttagtcaatattaatgactccggacaactcaaatagctttcaagctgttcaagccaggcctgcccagaccacagatgtgcaccagagggtgactatccactcaattcaaacaccacagatgtgcaccagagggtgactatccactcaattcacaccacagatgtgcaccagaaagtggttgtctgcccatttcatgccacagatgtgcccccggggatgactgactatccacctaattccatcaaatttaccttccttagaagagccagctctgggcaagcaaactctggaatcagcttacagcacagaacagagaaacaatgaaaaggaggaagtgactgttgagaaggcatcaagaatgaaccaggaagaaaaaaaaagaggaacacccagggttcgatgcaccaatacctacatgagtgactgtgacacagtctgcctgccatcagcctctgacacccttttctctggatttatctccttttcatcccattagcccttagaaactgtgggcatagccgtcacagagatacaaactaattgctcagtctgtccccctgaccaaagtgatggtcacaggctccatctctcacaagaggttaaaatgagaattttcagtacccatgtttcagcatgttttctggagaagccaagaggacagcaaagaaggggcagagcaaaggcagaggggaaatgagcaaaggtgagggtggggaggtattgtggaatatttacctgcactgtgaagatgagcctctgcctaatgtgccttctaattggtttaattaaaaagcttaatgaccaatagctaggctattgagagaatataggcagaacttctgggcagagagaagtgaagaagaaagatggatttctctagcagaccagggagcaagttggaggtgccatactgagcaaaggtaaaagccacatggcagaacatagattaaaagaagcaggttaatttgagttgtaacagctggttggggacaagcctaagctgaaggccaagctttcataattgttaagaagtctccatgtcgttttgttatttggggcctggtgatctaaagataatctgataagaaagcttactatatttggtgcccaacatccagcaggtaaatccacacagggcctcacaaagctggaaaaaaagttctgagtaggctgagtgtgggcgtggctatttaaagagaccctgcagcatgtgagtggggtttatgagctgcaggcagcgtgcacgctactagctacttggtggtggaagactaggtagaaactccagagctggggcagacggacgggctccagattggggcttgcaagcatgaagctctgagactggatgagacatgataagtcttgttggttacagagtcctcatgacttattattacatgccatcctttcatagggcatgaatagatttagttatacagtctagacagactaataacgttaacagatgccttcacttgttcaaaaataaaacaaaaaacatttttaaatgacttgtgcacactgcaattccgtgtgtgtgtgtgtgtgtgtgtgtgtgtgtgtgtgtgtatcctgtaagtttgtgtagtttcaaaaaaaaaaaaaagacaccaatgaagtagcccaggtggtgcagcctctcacaatgcctctgctgcagtttcctcaaaattctgcacccagaacaacttcaaagctgctgagatggcccagccttacaaactactccagccaagacttcaggtaagttctacactttcccatcacacagagactaaacaaaaataatacagatagctctcctaggacttgatcatcacccaaattttctcagggtcccctaaagataccattgctaccacacaacagtaagcagtctagagaatacgacacccacattcccaagaggtggggtggttggtttttgatcattcaatggattatagatgtttatcattgtttggggggttggttgcaacttgttgctggtcatggtaaggaagaaaactaaacaaagcaggttagattcaaagacctctctctgtaaagaaaaaagggggtataggaatgaggggaagaaaaggtagattactgaatctccttttaaacaacaacagaaaagctactactaatctcaaacattttacattggtatggattttggtttaccgatacaaatttaagtttttttaaacatactacatatacgtgtctactcttgtctaaggtattgtacatatgcagctcatttttaaatgtaacgtaaagttctagtccttaaaatctattattacaaactgtttaggataattaagaaatgtacattggtagttagtcatctataacaatcaaacttgtagtcaaggtcaaacagagatgtattttgatggtcttcaaatactccagagacctacagaatgtgtcatttaagatactttaataatctaaggcttttcatgacagtgagacacatctgctcctcatagcaccagtctacttcaaaaaaggatggtggcattgaacaacctttttatttagaggatacctggtaattgttcttgttgtatagttttattatgttagagttaaaacctttcctttttgggggtggagattttgagacacggtttctctgtagctttggaccctgtcctggaactcactctgtagaccaggctggcctcaaactcacagagatctgcctgcctctgcctcctaagtgctgggattaaaggtatgcaccaccatctcccggctaaaacctttcctttttttgagactaaaaagggggaaatgttgttggataatctttttgtgcactgtgaaaatgtattttttgccaaggcactttctgattggtttaatacagagcagaatggccaaaatctaggcaggagaggaaaggcgggacttctggggagagagaggaagaagaggagaaatctaggtgttcacatttggctagcagacttggagcaggccacctctctacatggcctccagtgttcagccccatccctctggcagcaaggccttctgggagatacctctcagcagccacacagatgaagtgaagccacaatggagtcccccagcactgaagcaaattgaacattacaccactttactatcacagtccaaagagacccaggacatgccactgctgatgtcggctcagaaacaccatggtctttacaccatcaagagtccctgatgtgtgagcagacgggatttgaatccaggtcctcaggctttaacagcagggactttacccacctctccaggtctctggctgaggattttctaaggcagttcttatcactttctgttctatgcccaacacacacacacacacacacacacacacacacacacacacacacacacacacacacacacacacccctccaccccttcctctccctttgttaattctctgaaataaatataacctttatcttggccctttttacatgcagaaggctcctcccccaggaaacacaggatttttattccgaggctgtcatatgtaagtgcaaaatccaggataaaacagactagcgaattagaagttctaaatcctcttaaaagcttgagtgttccacaattggctgcagattaaaaaaataataataaatctggccactaaatcactgtacttaagccagataatcgtgaacccaacagacaacagcatcctggtagaatgacttatagagtgtcctgaaggatgttctgagatgccatgggaaggacaaatcacactgaacacatatagacacacgcacacgcgcgcgcgcgcgcgcacacacacacacacacacacacacacacacacacacacacacacacacacacacgcatatagacacagacacacacacactcatacagacagacacacacaaacacatacaggacagacagacacacacacacagacacacacacacggacctgtctaaccagtcttggtgctggcttccccacttgaagtagccacagactactttctagcccaggtagcctcagtactcttccaggaacagctaactccagcactgattatacggaagggattggattatcctggcttctcaagcagaaagccatttcgccaagcctcggatttcagtgtgaggccaactcacacattttcatgagtttttttttttttttttttttaagatgaagacaatgaaaaccctgcagatgatttctataaaggggctgagtgaaggagctccagcaactgttcccagacagcattatgagatccagaaagtattctgcctactttactaggaatcgagaaaccccagagcacagccgacttttacaacccactcgggatgccagtataattttccccatcactggagtagataaatacaggttttatcctcttacagatcccctgagctgctcaaaatgtgaattatgtctttctacatttggaagggaatataagcacacaagcccgagcctagtttctaaagtgcctccccgataggattcccagtagcccagtcccgctgtggtccctggacaaacagtaaacacagcaccgggcacacagctagctccctgctgctgctgcagctgctgtatttggaatcgggctctggcttttgtagctgctttgtctaaatattttggggatgattcattcatggtttgaacattccaacagagggcatccccacagtcttttccacaccacaaagaggcaggccagggtgctgaaagcggggagcagagaggtacctggtatccccgtcaggaagctgtccagtctgcagcagcaccaggcttccccctgaaaccaccggaagggagttgccaccttcttggtagtagtgaaaactcaacatgcttggagctcagctggcgacaggaggctggcacaggccacagcccctaaggcctgggactgaatcagcagtgacccgcccctggagttttccacaggacattcacgctggggctgggaaggtcacactggcctctggcttccctgctgacaggcagaaatgaccagcctgcacactgaggccaccaccccttcccggggacagctccctatggacagagtggcaagtactggatccaaaggggaaaggagtatgtgttggggggactcaggcatccacaaacactcagccagcagaccatctttaagagtgaaaaatgaacagcacatggatggctggacagagggctgcgtgtccacagaataaagcatgacacatgacacagtgaaaagacagcaaatatgtctgcccaagcatgtacacacacacacacacacacacacacacacacacacgcctgcccaagcatggtcacacacgcacgacagcctgcccacccgggtgccagtctacagcaggctgtgaacgtcacagcctgcaaagctatacaggtttgtaaatgtgcagaaataggaagcaagctcctggggaagccaacagtccaggctcacaggttggcttttccttcaaaggtagtaaggggaggttagaagtagcagacacttctaggggcttacgaagtcccctcattttcagaggaggcaggtagccaggggtctggcataaaggaatggtccagaagccgtatgcatgcatcccagtctcaaccttccaaacgaaacagggaaaatgcagacatggaagaacccaaaggctcaggaggtaaagtagaccacagctcccccatggctcggtcaagggtggctaaacgctgacagcggaggctggtgaagggtggtgaccactctggccccatggctacctgccatctgcggtgacatctgaaaatcagagggtggaattagccactagctaaccatagaggtctggaggcctgaacagacagacaggaagtgaggtggctgggtggagagaggaatataggccggaggagacaggaacttgttctcttatcagtctgaggatttcatagaggttaagagctctggtgaccggccactctgcttctctgatcttcgggcaagctttatttgttagagtataaacaagatatcatcacaaccaccctcggccgtgaacaagacaatcagctctttacaactttttctcactttgcaaaatacagatgcaaggtagcaaagtgagtttcccagaattaaaagggaagaacatccaagccctttctccaaatgttagcttccacgtgtctctctccttcctttctcctgactaaaaaaggatggggagacagaccactgacagtaaataaaacttcaggaaaactcattcagggaaggaaacaaacacacaggattctcttcaaatagcagacaggtggaggggaagacagcatggtgggcagatgcctgcaggagccggattcaaaagggcttgtcattttcaatatcccccaccctctccctggcaagtatgtgtgtgtgtgtgtgtgtgtgtgtgtgtgtgtgtgcacacgcgcgcgcactcatgaacacacgtgccacagtatgcctgtggaggccacagaacaacttaggaaagtcagtcctctccttccaccacgtggggttctgggcatctgacttcagtcctctggcttggcaggaaatgcctttatctgctgagctgtaactccagccctgacctcacaatctacacttttgacttcctgctgggccgcacagtcaccaccaggacccttgctagacagacagtggtgtgcggttcagtcgtgcagtgccacacatgtctatttgggacgggggttgtcctttgtctgaccagtggcagtttaagtttctgtctctgtgtggatgttttgtccctgtccaaacacacacttagccatgcaagctattaacaggtggagggactttcaagaggtggcaatgcaggtctttagggccagcaattcttaggacagtggggcagcatgatgtccttacatgggccaggacttcctgtccctcggtaccatggaccccaataaagtctgtataaattatgcgatcttgggcattctgttatggtaaaggaaaacaggtgaaggcaatcagaaacctggttatttaccccccctttcctatttcctttatatttttctcccatggacactgacaagcacgaacctaaaatacctgtgcgagtgtcacatgtatgggagccgtaacctcatgctctctggactctgggaccatgttacagcgctctgtggctcactgcccctgcaaggtgcccttggctctctttcctggagggccatcgccagtccccacagcagcagctgtccacaccatcccttaactgaagtgacgcagaaaaagagcagtgagcatgaaaaattcatttgctggtcctcttgggtgaaagggaaaaaagctgtgctgtgggtggactggtgtggaatggctggagtcactgtaccccaggttagaccttcatcttcagggtggtcctcactcatcttgctttccttgtccatacagaaatgagtttgaccaaacccatcagggggcttccttctagagtctactatttcttcctcgccaggtacattcgggaacttaggaagctgcgttgcgttgttcaattctgaacccagggggtaggaaggataggaaggatggaggcacggtttccatcctccctcagtgagtgggagactgggccgggatctgaacgcaggatgtctgattccaccaaacctccactggcatctacatgagagctttgagctgctaatccagcatcacatcttcattgtcttaaaacaaaacgaggatgcaggcacccgggattccagtgctcaatggaaaattcggatactgaaaactaaatgtgtggatacaattgaatgttcctatcttttagggtgctcggttctggactctttgaatcaacgggtacccctgccttcacgggaacagggtttagcagtctttggatggggggaggggtgcagtttggcatcttctctcttgtctattagttaattcccaagcctcgttccctctgtacttccctccctttcctctgagtgaaaggcagccacctgatctttcttataattacacaagcaacacatttttaaatagggagctgtttatatataacacatgggagtggagaaacccaactacaggctcgggaaaagaattataaccaagtggcatttattaaacactcccctggggatgaaggctgaaaaagccatgtgactcgagactgaaggaagggagtttatcagattctgaggctcctgtcctcttccacagggagctagatgagaactgggaccctcagcagggacatgtgaaggccggagatgcttaggggattggcacagtgtgcagtctgtaattgtgcctctagtggaccttgtgcaagcttcagaactttgcaggtgacatgttggaatacaatgttttctaggggtgggcaggctgctctaaagtttggacctccaatgccatcaacaccatcccatgcctatctggtagcttcaagggcttcaaggcccttttccaggcagaacctgtcaatggaatgccctggccatttccatcttacctgccctccagcaccccctggcggttccctgaaaactaaaattccagttcctctggccttcccctgcatctcagagctcctagtctacagcacggcaattggattttattttctgtggatatgcccacagaaactaagctcatggctggggcagagtctacatgactcacacagatggcagctattgtctctagaccctcaggagtcattgttgccctcagagagggctcccttcagggtcctgagggcaccaggccttgtgctataaactgtggtctgtatttaacgtagactgccatactgatttcttctggagaacttcagtgccgtacttgagtcttaaaaccatcttttgtatttcctctttttgtgtttttctgtgtttcataaatgcttttcaataatcacgaatggagaaaagcattttaatatataaactttaattaagggatacttctgattattcaggaccagtgacacagaaataataaaacaatacagttctgccatctagtggccacaatgcaaaaaaaaagtatttgaaggccttaactctgggtccaagtcccatccaggcatttgggggaaaaggggtttgttcccccaaccccgaccctgtgaattcttccagccttccaggataagtgagtgggtaatttggctcttaattaggggcagttgtaggggtgataatgcctcctgccactgccctacctagtgatgagcacctgagataagggatgacccacatggtgatgagcacctgagataagggatgacctacctggtgatgagcacctgagataagggatgacctacctggtgatgagcacctgagataagggatgacctacctggtgatgagcacctgagataagggatgacctacctggtgatgagcacctgagataagggatgcctagggagagaaggcacctgccctgtgtggccaaggatttcctgaggggaagccacacttcctagagcacccacatttccagtgatgatgggccaccaagttccctgacaatgctgaccaaggtaggaaggaatccttgtacttcaagtctatgcaggttagaggtagcctcctcatccaggcacatggaggtccccacacaacactttagcaggaaagacccaggttaaagtgaaaggtgtcaggagcccagtgagtactagacacacgctgtttcaaatcactcatcatcaatccatcatccatccatccatccatccatccatccatccatccatctgtccatccattcatcatccatccacccgcccatcatccatctgtccatccaaccatccatgctggcttgaatgagaatggccccatagtctcctgtgtttgaatacttggtccccacttggtggaactgtttggaaaggatcagaactgtggtcttcttggaggtgtgtcattgggggtgggttgtaggtttaaaagtccatgtcattcccggttaggtctctttgtgcttcatgggtgttgtcacttcccaattgtctcttgtcttacacctctaggtctacttggtcacaggagctctgtcaacttttacctaacaggttctctgagtttggctgccctgccctatcttccccacttctactccatctactagacatgtagacatttgaacacaacgctataacctacaaagttcacgggaagaaccacgcagtccaatcaagttacaaaaagtttcaaacagaaaacaaaaacagaactcatagtgttttaagtacagttagaattctgtgctgggctccacccatagatacccttaggacatgtggctggtgtgctgggggctgtacacctgactgcaggacagtggtcacagtccagcttgcagcatgcctcctttccggccatcgtgtacagccagtggcagctctggggcttccagcacagtaactgatcaaatcaccctactgtgaaagccctgtaatatcttctgtgttctttagtactgatttcaaatacctcagttatctgtttagctctactttgcctcccctgtctctttagaagcagccctacaatgaccttgcttcccattccaaccccaaggcacatacagagcctaagagataaaggtgcaacagcaatccaggttgagagctgggtttgagagacacatgacagtaacttcaaatcctggcccagcctttgaggaactcagagctaggtacagtgatggacacctgtaatcccaggatctgggaagttgtggcaggagtggtgaaaatgagaggccagcctgggctacatggcaagatggtctcaaaagccaaaaaccaaccaaactatggcacttgttgcaagggacttccctcctccctgtcactctataaacccctaacctctgagcagaggactagaatgaattatgagatctgaggaatataatgaattatgagatctaattgtaaagccaggtaaactttaatagatgaaaaaaaaaaaacttttcatcttaggttcagaaaaagaaaagaaaaaaaatcctgaactttaaggacatgttacaaatcctaatagcattttatctgggatttcttcctagtaggtggctagtgttgtatttaacacagttcttggagtcacctcctgcccccccccccccccccggcaatggaattgagtatggggtccaggtataaagtttctaacatgcagaccagaaaataatgaaaagtcagaagttaatgaattcccannnnnnnnnnnnnnnnnnnnnnnnnnnnnnnnnnnnnnnnnnnnnnnnnnnnnnnnnnnnnnnnnnnnnnnnnnnnnnnnnnnnnnnnnnnnnnnnnnnnccagggtgacacctgggctcagagtcaagaccaccgagtgttataaatgccaacataatgaatggtttaactgcagaaaacagactgtactttttcgcttacactcatccaggtgagttggggcacggctttaatcccagcactcctagaggcagaagcaggtagatctctctgagttcaaggccagtatgatctacccagcaagttccgggacagccaaggctacacagaaagatcctgccacaaacaacaacaaacctaataaaacaaaatgatggaagtggaaattttctgtcttttttttttttttcacacagaagtattaaatccctgtatctttagcctggtttgtgttggaactctgataactgctatgtgacttcctgttctgagtttcacaaaagatgttttagcttgggactgggacacaatttacaaccatttctccacttgccctccatgtactctggtcactttgaacgtagagtgtcattttcagtcttgagaatctttagatcaacaaaccaactgggacaaactctgaagaccttttaggtcctgcagtatcaaatattcagctagtatttctttgttgtttggtttctctgtgtagccctcactgtgctcctggaacttactccgtagactacctggcctcttcagggatccacccacctcttccttctgaggtatgagccaccacacctggcttggctgagacttcttttttttggcgggggggttgagactgggtttctctacggagcattggggctgtcctggaactccctctgtagaccaggctggcctggaactcacaagagatcatcctgtctctgcttcctgagcactggaattaaaggcgtgtgccaccttgtcacctggctgactttgttgttgtttgtttttatttttttatatttatttatttatttttggttttccaagacagggtttctctgtgtagctttggaacctatgctggcactcgctctgtagaccaaggtgtcactcacagagatgcacccgcctctgcctcccaagtgctgagattaaaggcgtgcaccatcaacgcctggctgagacttcttaatgtaaaaaatagcacatgtatctcattagtgcacaatttccagctttggtaaatggtaaagtttacgtgtatggaattgcttattttaaaaattcctttattttggaactctcatattgttggaactccccagagttcccagggtctctttagaaaggatctgagagcctttctaaaggctctcatatgttggagagtgggtgtgtgcatgcgtgcataggtgaatgaagtgtgtgtgtgtgtgtgtgtgtgtgtgcacatatatatccattcaggtatttaaaaatcaaaagctggagggtaacctcaagtgatagtcctcaggatccaaccacttggtttgtggggcagggcctcccactattctgtatctccctggtaggctagtgtggctggccagtgagccccagagatctgcctgtctacacctcactagacctgacactagaagtgcaggacaacacactggcaaatcctaactgcacttcattatcatggatttcctcctgggaggtggttcctacacgggttctgtctggtgacagaactcaggccatcacacctgtggtaagcactgtagctactgcgctatctcccagcctcatatcaaatttcctgatggttattagtaagcatttgatttttatatacctaaaggatatatatgtatacacacacacacacacacacacacacacacacacacacacacacacacacggagacacatacaaatttcttgggtcacgaatggaaagactttaagaagctttgattatttaaaagagccagatgcctaaagaaagttgagaaaataaactaatgtttcacagcctaagagaatatgacattaaatcatcattcactgtagctcagaactgttcaataattcaacagtctcatactccatgcaacaaaatcagcatttaagaaaaacagcacataatttagataccatgcaaggacactgaagcgttcacttggataacacaaactctgatgttgacatcagccatgcaccgaaaaggtgcaatgtaccagaaccaggttacccaagctcgctcacttcccaagggtggagggggcataccacagactatatcagttcagcaaaacagcagggtttatgccaaggtctaggtcttcaagcagaattctcaatcatcccaaaaaccttagtcatttgctttaagcaaatacatggccaggtcctcaacttcccttcgtgtgggtccccccaaacctcgtctccatgacaccctaacctttcctcctttcccatccccccatctccaccatgtatctgacagagccatgctgcctgcacaagaccccagccacctagcaaagggacaagaggcatttcctataacataaggggggtggtatttgggaccctactttggaaaacatcttgaataaatccattcattatgttgcagaatggaaagggacggtggcttaacaacagtgtgtctttcagccccactattccctgcggtttcctcctggcaggatctcaggagggtggagcaagcattgacattaggaggaaagcagagctgggctccatgctattcccttccgtccctacccctcacgtctatccaattataatttcaaatccagaaacatgaagattgccataggatgctgtggtggtttgaaagaaaacggcccccaaacagaatgtcactcttacaaggtgtggcctggttggaggaagtgtgtcactggaagtgtgggcttcaagtctcatacatacctaagtcatgcccagtgagacagttcacttcctgttgcctgcaggtcaagatgcagggctctcagctctctctccagcaccatgttggcctgcatgctccccaccatgatggtaatggactaaacctctgaaactgtgagccactctatctatagtcaaggtcacggtgtctcttcacagcagtggaaacactaaggctaatgcctaccaagacacttactaaatgaaaagtggtttcagagctctactgagggaaagccagtgtggtgtgggtaactgcttgaccagctggctttgcaaagtatcgtatggtgtctgcacacctgagcaagctatgctagcaggtgggcagtcctatgacatgctcatgcataaatatattacaaagactagtttcgaatgttcacaaatgcccttttcccaacctttttagttacagactgatctctaagtcaaaggcaagcggccttggaaagaactgcagtgagttttgccacagactttttgataaccctcctagacattgggggttgaagaagagtcaggtaatttccagctctttactttgaacgtgagggagcacccaattgagctgtcatttttggtacagagctcagaaggaattcaagaattaaatgccattactagtgccatgctcttccatcccataaatgtattcatgagtcttcaatgcttacatatctaaagatgggaaagaggcactggctttgcatcccagtgctgagtgcatttcttcacttattaagaaacatttttaacgcctgcgaattcagtatgatttgcagtgtctacttattttgatgagcaacaaggtagcaacgctaatgacttatttacctagagtaactgtgaattagaaacaggaacttagctgagggtgaattcctttcaaaacattcaggaaaactggaagatgccttcaaatgcacacgtgcacacatgactgcatggatagtgcgcacagctacatgtcatagtgaggacagaagacgccttcaaatgcacacgtgtacacatgactgcatggatagtgtgcacagatacatgtcttggtgaggactgggcgactttcagtaactaaatctgagagaataaaatgaaatagaagacaggattttaaaagggaaaatttaagaggaaaaaataagataaaaattctgtccaccaaagtgttgtttatattttttaatgaataaggaaagctaaaaagtcccttcctatgtagactccattggatgcacttaaatacaagatggtcactgcttagcacacaattcttttcatgtcttccaggaagtaaatacaccagagattgactggctgctgaacagtccctacttgcctgtcacctgaacactcaaaagtgtcttaagaaatgtcaccttaagctgtgtagggagagtgcagtgttacaatgtgacatcaaacacttgaaggccactgctttctctggaaaatgggctaacctgggcttctgaaagttcccaggagttggagctgtattatctctaatttcagcggattattcacatgacaatcactgatattcaagcccactgtgctgcggttccaccttcctgcgtccaatctggggacggtctggcctgaagctgcctctggaggctgagtgtggggacagaaagcctgcaggtcagcccttcccttcctgagcacggcatggagtccaaccgcagccatcctgccaacaaaaccacctgcaataccaaatcctgccagcaaaaccacctgcaataccaaatcctgccagcaaaaccacctgcaataccaaatcctgccagcaaaaccacctgcaataccaaatcctgccagcaaaaccacctgcaataccaaatcctgccagcaaaaccacctgcaataccaaatcctgccagcaaaaccacctgcaataccaaatcctgccagcctgtgtcttttccaccaccatgaagttcaccgagcacagtgggcagcatcccagcaagtatcccttctttacagtttctggaaagaggattcatccttttttggtcccttttccattttcattgtgtgtgtgtgtgtgtgtgtgtgtgtgtgtgtgtgtgtgtgtgtgtgtgtgtatgcatgtttacatttgtgggtgcatggtatggtagcaggtgcaagctgttgtgtattttgaggcccttggttgaagtcaggaattgcccttgatggctcttccgccttcttcaatgaggcaggatttctcaatctaacccagagctcacaataaggctagtctcaccagtcagctcactctgtggactcctgtctctgtcacacaaggctgggattacagacaggacaccacccatgcagaattcatgtgggttcttggaatgtgaccagagtcctcatgcttgcatggtgagtgatcaccaaggcacctccctgggcctcatgggggacgtccttctgtatatatatttctcttattggttgatgaataaaacactctctggccaattaaacaggaagacaggcaggactaggatgaggagaattctgggaaaagaaggcagaaagggcccgccagggacagtcgccatgtgagctgccaagagttagaggtccagacccttctttggtaagacaagaccacgtggaaacacttagattaatagaaatgggttaataattaagacagagcaagccaataagaagccctagtcattggccagcagttttataactaatacagtggttatgtgtttctctggggccaaacggctgcaggaagctccacaacacattcttacagcagagttcagcaacctgagtatcgggttttgtttcctcacactgttgagaactctgactcagaaaggactctgtgcctacgctcttcttggcatgtcagaagtgccagcatcgagaactggccctctggaggcataataaaatgaaaaaagggtgacctgaccacagcactgtcatacctcaagtgacaaccaaggtgtctcggtgactaacaggtgagcagcgtccacatcctcaacaaggaggttgcagatctgggacaggaaagcagggtgacacaagacgccgccgcaccacatggaacagtcaatgtgcaattcacaaccaacgagctgcttatttctggagttttccgttcagcatgttcagaccatggctgtgttaactgaacttcagagggcagagtgggctcacccctgaaagaagcacgtgtgtgaccctcaggaagagccacacacgctcctcatcaaaagaagtttcgaggtgcctctgctcccctgcaccctccttttaaatgtttttaaagttacaattatgtacatgtagaggtcagaggactacctggaggaaagtcatcagggttggtagctgcggtctctaccctccatgctgtcttgctagcccagccctccttccaagcagaaaacacaccacaaatccattaggtgactgttgctgctactgtcccagctctaccattttaccgactcattgtaaaataagccatcaacctctgtgcctcagtttccctaactgccaaatggcattagcgatggagccatctccctggaatatgtatggattaatgcgataatagcaataataaataaagatgtgattactcacacattcagatgcacactacaaagtgagctcaggaaagtcagggccctgagcatggatggcaccagtttcacccaaggagcaagtcattctggtacctgctattcctagcacctgaattctgcccttcggccatgtgccttaccaaccagcatcagaagccccaacctcgctctgcaagactccccgaatgagagcagcctttcattcctgggaattatccctcaaacacccccaaagcttggacctgcccaagcaagatgatacctaactgttacacagagccttgcagaccacgccccccccccaagaacacccctacacacacaccacaaacctccctccccatatgtgggtggcaatcaggcctaagtggctgaggggcaatgagcacagcaaagcagaaaacttaccagagaattgatgagataatggaggagcggtcgggcttagcatcaactccgtcttcactggaaggatccactttttccagctctgcaacacagttctgatcatctgccatctaggaggaaatcaaaccagaggaacagagatgcaaagtgctgccgttgccttgtgatgcatgtatgtgctcatgtgtgtgcaagtgaacacgcatgtatgcctgtgcatgtggaggccacaggtcaaccttggctgtcgttccttaggcagggccctacccccttcttttccgagacaggcttcctcactggcctggatctccccaatcagggtaggctggctggccagtgagccccaaagatccaccagtctctgcctcccactgctcctggctcctcgtggggttttaggaactgaatttaggtcttcacacctgagcagcaagtactctgccaacggtcaccctctgttccttggtattttcaaatggcactcttgttcttaatgaattaaaccttggggcaagcagatgtgcatatttaagccccagggttcctgcaccagcaaggtaatagtgtaattaaacagtgctgccaggcgttggtggcgcatgcctttaatcccagcacttggggggcagaggcaggtggatctctgggagttcagggccagcctggtctacagagcaagttccaggacagcctccaaagccacagagaaaccctgtctcaaaaaacaaaaacagaaaaaaacaaacaaaacccacatagtgccaactatggcaggccccctttcagccaccaagtatgcacatcaagaaaccaaagccaccccagccccgatggcttcgataaacatttggtgtgtgcaataaactgtgcacagcctgtcatggttgtaaccatcaggaaggccccctaagtccctggcagtcacaggatgcccgcattttgcttggcatcactcagcacacctccaagacagcacagagctgtcgtcattgcagcagatctacccaggtgggtttccatcaaatggtttccctactcaagaatcttcaagatggctggagagatggctcattggctaacagcactgtctgcaatcccacaggacccaggttcaattcccagcatctacatgacagcttgaacctgtctgtaactccaattccagggcttctgacacccttacacagacatacatgtaggcaaaacaccaatgcacataaaataaagataaattattttttaaaaggatcttcaagagcctaagggccagtggtaaggtgtcagggcaaggactaaagtttgatcgcagcatggtgacatgaacttggaatcccagtctcagggatgcagacacgtggcctagcttaatcagtagttccagacaataagagaagaccctgtctccaaaagagaaaaaagaaggtaggcagactcctgaggaatgacagctgaggttgacctttgcctatatcacacatgcacaaatacattgcacacacgctctgccaagtgatccgcaccatttaaaaaattttaacttgtctccttggatttcaaggcccttcacgacctatggcaggtgtcagcacactggcccacctgttgacgtgagtaaagtctgttctctgcctgtttgctctctgtgagcagacacaaaaatatttactacctggctgtttacaccatgtgctctgcctacttggctcctgtgtttgtcactttatttatgccctgctaattgcctggctcccgtaggacaatataaactcatcatggtacaggcatctggcacacagaaggcgcttattaaataaatattaattgagtggaagctggaaggaatgaatacccccacgggaaaagaattagctaaacaagatacagctgatccaaggagagaccatattggagccattgttcacaagtcaaatcctgtttcattctgcatgaaaagatgaggggtgcaaacttcagagtttatctggtctgagaccttcagggggagtgtgtgcacacctttcagggctggcctagcgactgttcacatggctggttttataaaaagaaaatggttatatctatctgccgggtgttggtggcacacgcctttaatcccagcacttgggaggcagaggcaggcagatctctgtgagtttgaggccagtttggtctccagagcgagtgccaggttaggctccaaagctacacagagaaaccctgtctcgaaaaaacaaaagaaagaaagaaagaaagaaagaaagaaagaaagaaagaaagaaagaagaaaatggttgtatctatcttacaaagtacttgtgtcccaggatgtgacaatgacgacattgtaggtggcatccagcctcgggagggtgtccatggaggccaagcgagggtgttgtggaccttggctctcaggtatcactatggagtcactttctggcagatgacagagacagggggaaacagaggagagggaggtgaggagggagaagagaagaaagggaggggagggagagagagaaaagaaggaggggagaggatgggaggggaagagagggaagcagaaggaagagagaggggaggggaaagagaggagatgatgaggagagaagagagaggcttggctcggcttccaggcagtggagaaggaactgaggcaggaaggacacacccacagtggccaggagaaaccagatggcctccccaccacagtgaccaagagctttagatcaggaccccaaatgtctcttatgagcagagatgacaccattggaggcgataagcagaggcctggcagttagaagacaccagcagtttctggttagccgtcttgacagattcttccttacacttcaagtacagtcatcagcagggcacatgctcaaatatcttgacaattagccagtcaaatctatgctaaaacctacccgaaaagacactatcttcaacatgttcttaaaccttgattctttcaccaaatttaatcttaaaggttaaacctaagatccataagacagagagggagggaggagtatggaagagggagagagagagaaagaggagacagagagagagagagagagagagagagagagagagagagagagagatcaagagagatcaagtcttagaagtaacaactttggcccactccccacagaccagaatacagcctggaggtctaagtgtctacagggattccagcattaagagatcaaatcctcaaaactgtacctagctagcagagagcataagagggcagtttcatgtccccgtcaccctccctagaaagatggggcaaaacaaaatattttaacagcagtggatggatgaacaaaatgtattatctgtcaaagggataataccccaaacagaagaaagtcacccaactaaatagcacccagtggcccttcccccaaaggtccccagcagcttgctgctaggaggcgctggaagccagagtgagccttgcagtcactcaagggtcctcagaggaaatagactcacttcctcttcctttttaacttccaagccatgaagcaaacaccccactgtcctcatgtgttgaattgaagggaccagctccccattttggcagccgtaacagccgaacacatgcttgtctgaccttgtcttggtcactaaggtcagatgcctgctcctttcggcagccataacagctgaacatgtgcttgtgtgaccttgccttagtcactaggaggtcagatgcctgcctcgtggcaaggaaccaatcagaagttagctggtggagctatgctttagggctctgggtgtgctttatggacaagttcacagcaatgacgtgcagagcatagcaaccaccctgggagggcctatgggccataacaaccagttgaccaatcaacacagggtaagccctccaagcctggaggcacaccaatcctgagcctgtgtgtatccctagacactccccttacgctgccctataagatctctatgcagatgctttgagctgtctttctagccatctgccatggtggatgcatgaaagacccgctctaacatggggttaaacaactataataaagcctcgtgcagtttgcatcaagctttcgactccacctggtgattggggtgaccgaggtcctgggctgagatcctggaggcctgagttttccaggggtcttacagaatgaggtcttggtctccagctggtggggagagggaagcttccagaggtggggacttgctggagggacttcatcactgggaccgtttcctgagggcaagagtgtacctggacccatcctgccaccttctctctgctttctggttgcccaagagagcagctttactgaattaacagccctgatgctatggtgctctgcctcatgtgagctgagaccactctatagcagtggttctccacctgtgggtcgagacccctttgggaggggtcacatgtcagatattctgtctatcagatatttacattatggttcataacagtagcaaaatcacagttatgaagcagaaatgaaatgttatggctggggtcaccacaacacgaggagctgttgggggtcaccgtgttaggaagggtgagaaccaccgctctacggggaggctctccctaagttgtcctctgaggtatgggtcactgaggaaaaagcgacccatatgtaccaggacgggctacatcatcagctcaggtcctacagcaacagacccagtcaatcatgggctggagcctccaacgtggtgagccagagcagaccaagtctccttccacgctgatcacctcacattatctgttacacaaacagcagaaggctgacaaacacagagggacccattcctagttgaggagctactgactgcgagggagggagagtcagttttccttaggtacaccgactgctccagtgcaatgcctcacaccatgtacaaatggtcagcactaatcggactcagcagggcacttccttcagccacgtcttcttcacaatgcctacaccaccttctgatggaggcttgtggtggcttgaataaaaatggccccttaggctcacagggagtggcacaattaggaggtgtggtcttgttaggagtaggtgtggccttcttgggggaagtgtatcattgggggtgggttttgaggtcctgagtgctcaagccaggcccagtgtctcactctcttcctgctgcctgcagtccagatgtagaactctcagctacctgtccagcaccatgcctgcctgcctgcctgcctgcctgccaccacacttcctgccatgatgacaatggactaagccaggccccaattaaatgctttcctttgtaggagttgcctcagcaccgtctcctcacagcaatagagtgctgactaagacaaggcctgaagcatctccctggctgctgggaggtgaacaactttgtcccaccatatactctcatcagcaagatgctctgccttgacacaggcccataggaacagggcaatcagaccagacaccgagatgcccaaaaccatgagtcaaaatatatcttaggaatctaagccttcagttaacaacctacatcagtatcagtggccttgtctcttcagtctataaggctaaacactctatagcttccttgttcccatggtgaggccaactcttgatttgactcctggttttatcctcaagtcctcccagaaagccatttcaccttggtttcactgtgctgtgggggtggggggtgacttcctagatcacctttcctgagcctgtccccttttcaggggctgcaaagagcagtcattacagtgacattgcttgctcactgttaagagacatgaaatgtcaccttaaatggcttaaagtgtgtgatgcctgctgttatggtttgggtgtggttggtccctcagtgatgcctgcggtggaaggctagtcccctcatgatgctaagcaatggtgagacttaaaaggaagccaccaccatgatgcttatggatgctcttatgggggccctgtgttagttctcaagatgttgattagcaaagaatacgatcggccaatccctgatgagtccaaattcctgtcttacaatgtgactactcctacttgcaagcactttggctgctgggatgccacctgccctgagagtgtacccaaacccacactgatagttgtgctggctagttttttattgtcaacttgacgaactagagttaccccaggaagaggaaacctcaattgaggagtggaccagatgacactggccagtggccttctctgtgggggatctgtcttgaccggaagtcccagcccactgtgggtggcaccatccacaggcagctgggtctggactgtgtcagtgagtgagtaaggaggtttccgcttccgggtgcctacccagattccctccgcggtggagtgtgacctgcaatagtcagaggaaataaaccctgtcctacctaagttgcttttggtcatggtggggttttttttgttgttttttttgtttttggtcacagtaacagaaagcagactagacttgtgtactcaggcggatcccgcctgaatttctttctttcatgaggaaactgaccggccgtgcatgctttcctggcacagtgacaccacacacaacctcctgcccaaacattttctttcctaagagctcaaagtcctgaggctgccaccttccacaccagtgccaccagaggttaacatggctaggtaaccagaaactttgccctctgccggctgcagggtggcagattataaagttaggcctcaacagtaaggagggggatgtaaggccaggctggccaaactctgaaggaagaaacggcccgtaaacaggaaatggggcctcatcagtaagcccacgtcaagggaagggccagagaactacttaaggaacctacaagtaaacttagcccgaggagtaaaccacaaagcccgaggagtaaaggtcgggtcgacgtcgtctggagcctacaccgccctcccggagtggtctgcgagtttcccaccttctctagccggtgcaagagccctgatgcaagggtcccccaacaagcacgagtggttcgagcacactctgccccggtcagagacccgagcaccctaactccctcctctgcgcgcaagccagccaggaccgcccaagattcccattgcacagaccaggcgcccaagcggcccggccggtctgacaagttagtttcccctgaggccaaaccaccctatccagggccctacgtcccttctccttcccgtcacatccgaacggcaccggatgtcgctagacccccagctgggaggccgagggaggggcgagcctagcaaagcctgcgagcagccaagttgtgcgagcctgccggagggagggaggggggagggggagccggggcggggacgcgcgcaggaggaagcactgggaaggggggcgggagagccgcggtggggaccccagttaccgttcccacggtggcgggcgggagtccacggcagcgtcggatcctcggccggggtctgggaccgctttagggaaagcgaaagtgaaagtccgtgagcccgagggggaggagcgggcggggcgggcggggctgcgcgcaaagcccgggaaagctggccgcgcgcgggtccgccgtggggacagccctttccgccccgcgcgcagaccgccccgggccacacgcgctgcgaagccggccgcgtgcagagcgtgcagcgcgccacgtgcacggcccagcccgctgtgaggtctgggcgacccccgcccgcccgcccgctcgcccgcccgcccgcccgctcgcccgcccgcccgcccgctcgctcgcccgctcctccgcagcacgaagcccgcgcgctccgtagaaccgccgggccgccaggaaagtgagccccgggctaccctctgccaacctgtcacgtgctctgaaaagctgtgcgcagggtccagctctctgcgaagttggccgccaccttcacccgaggagaggggccggcgagtcgcagccacaccctccccggactgtctcacccgcgctactttatgcaaagttcccggcgctcacccgacggcgcgcgcgttaagccgggtttctaaacccgctaaagtcggggatcccggtgccgcgccatccctgagaaagaggaaactgcaaaagtgcagatcgacccaaagatttgacatgccctcagcgatgcggctcctgtcttgtcatttccccttcctctaacccaatcggcatctctatcccatgctatgcagcaactgtcgccttggtctggtgtcttcccagaatcattcttgtgtcctcccctgtgccaggcactaggcacgaggaagcagacagtgcatctccacaggttcctgttgcatggcacctccaacacctgcgcacgcacatcctcatgtcacccacccacctgggcttccaacatagaggcttccggttccctcagcccagagtcctcagaaccgctaattaaattcattcacactgaggtgaactatccgagggcagcggtagttttgggcataccagaaatacctgcctctagggcctgcaagtctcgagtcagaatcatcggggctatttttttttttctattttgctttttcttgagcctgagagtttcagcaccatctctgaaatcttatcaggtatgggcacttcttggatgtcgagaaagactcaccccagataagtgtgagggaataattaaaattggcaattctcagtatgtgggaacccacagacctgactccattctattttgacttgaggtcagagggtttttgcctgcccttgctcttccagggtgaaacaacaatgatgtctggcctaaaatgtaaatataagaggatatttggcctaaggtgtggtcgctgaatgtccttcctgaacaacagaatacttaactcaggagatagttacttgactttttgggtatagagaaggtaattgtgcttgcttcttttttgtatcttgataaaaaagtcttttgccttctccccctcctttgatgggggtataaaaagactttgagaaacatggtcggttcagtattcaccgaatgctatctcctgtcttctgtgtatttctttcttcaagcctcactctttccaagcacagacctgacagactagctagtgaatctggacagcagccccccagcaatgtgggcaagtgcattaatatgaccgccctactttttatttaatgcttgtgaccttgaactgttgtggtaaatgttgtggtaagccatggcttgctctaagatgatttgctttttaagataattcaactggcagcccagtgttagtggcacaggcctttaatcccagcactagggaggcagaggctggcggatctctgtgagttcaaggccagcctggtctacagagtgagtgccaggatccaagctacacagagaaaccctgtcttgaaaaagcaaaaaagaaaaaaaaaaaagataattctactgggatactggcaatcctttgaaaaatgaagaattccattaagtgaaattgcactgcgatttgtctacattgtaaacctagacttttccaggttagccctgaaatgtggaagggaccttaacagctcatctctgctcattcggtgataaagaatatgaggctttgagaggttgccctcgttcaagctgggtgaaggagccaggtgttgtggaatgttgttttgactgggcaaggatgtgttgcattgttgcagaatattacatttgtttatgctgtgtggtgatatattatttatgatttattaaagctgaagattcagaaagcaaagtcagccacaagccacagaagcctggcacacaccccttcaatcccagcagccagaagctaggaggtggtggttcacacctttaatactaggactcaggattaagaggtagacagatctctgtgagtccaaggccccccagatctacacaagagtgaatcagtctaaaagagaattatagctcacacctttaatcccaacattaggaaaatatataagacagaagcaaggtctcagagaggcttttcattctccagccacactggggagaggcagcagtctgagacttggtgaagagctcatgtgtggaacagccctttcagcctgaggtagaggtaagagctgatggccggctgctttgtttttctgatattcagcttgaattttgagccccaatatcagtctttgggtcatttatttattcatggtacaatgctgcatctgtttaatatgtaaggatgtatatttaaccatgcaaagatgtgttgcatctgttcactttccctgcctaaggcacctgatagagctaataaaaagcagaatggccaatagtagtcagtagagggatggatggggctggtgggcagacagaggaggaggagagatctaggcttgggagagagagaaggaggaggaggagagaatgagggagaaaaagaaggacatgcccagggccaggcagccaccagccagacacgagaagctgggaagtaggacatacagaaagaaagataaaaagttccaaagcgaaatgtaggcaaagagaaacagattaaaataagagctccagcacttgggaggcagagccaggtattgttattttgctgcagtgaatggtatgaaacaagaaccttgaatcaacaaacccactgggggttttgttggtagaaagggaaagagtgggtagatggaggccaaccggagacagggagagagagtggggcgggaagggtgcgagcttaaaagggaaagcccacacatgcccaccgagtcctgagtcctccggcatgcgcagagttcttacacagctctgtactgcctaacgagtgacgtggagaagacatggctacgtcactgtgcatgccccacccattgtcagagggctgggggcagcctggtgttttagttccaacaatctcacctcttattattaaaaatggtggggagttgggcatggcaagttaggcaataagggtgttgagttctcaagactgcttcctgttgacctagcgggtgttgaccatctttgggggacctgagaaagctgggtgttgccatgtcctggggtagctggctgctccatcgaagtcctggctatttggaactctggcatctctgtagatctggtgaaatgttagagtagaggacaaagttaggtttagaaaatttttttcttaggtcctggtacttgaggggaggattataagatgagggaggggtttccaaggggtcccaagacgagggaagggaatcccaggacgacggggtggggggaggaggttgaataatatttatttggagtgaatctgacctgtttggatgggtccaattctgctccctggaacttgcttttagttgttgaaaatgtaagtattagactcattggcagcacatttacatcagagtcacaataaaaaaaagcaccataactttgagcttgtagttttgatcgtatctaggctgtatggaatttttctggttacctttactcaggaggcacaaatgtttggtggtctttgtgtctctagatccgtggcttctggctggcattcctgtaacaacagctaataggttgaattagaagttttaagtgagttattgaggaatacataggagattggtgagcagggtgtaattagaaacaggagagtttagatcatcctgagggcaggaaggaaggcgtatggggttcccagtctggcagggtgtggttgtaggagtggagcctatttcttctgaaacaggaggcaaagtagttgatccaggtgtcctccgaagcttaaggaacagggtcctgttgcagttgctgtgtgtgaggggtgagcctcaggtggagaagtaaagggttggaggtgagatgagtgaatccagtggattagcagctgttggagtgacaagaatcaccttgaatgggcctggccatttagggtacagggatgaggggtgttggtctggaggagagagaagcacctgatcccgatattaactggagatgtacaggggttggcgcatggtcgaggtagggagtggtcagtaaagcccataggagggagcagagacgatgaagtagagtgtaagcagatggccagggggagggctttaggtgcgagaccaggtgtcagaactgggcgcccacacatgagttcaaagggtgagatgaaaaggggtcatttggggagagccctgagcctgaaaagagccagaggcaagagctttacccagtcaaggtgaagttcctgtgacattttaacaagaacattctttaaagaacagttagtttgctgggcagtggtggtgcacgcctttagtcccagcactcaggaggcagaggcaggcggatctctgtgagctggagaccagcctggtctacaagagttagttccaggatagactccaaagccacagagaaaccctgtttcaaaaacaccaaaaaaaaaaaaaaaaaaaaaaaaaaaaaaaaaaaaaaaaaaaaaaaaaagaacggttagtttgctctaccttccctgaggactgggggtgatagaggatatgaaaacgccaagggatgttgagagatttagatagggttggggagatctgagaggtgaactcaggactattgtctgactgaagagaggctggaatcccaaaccaggggataatttccctgagaaggatgtcagagactgtctgggctttcttgttagtggttggaaatgcctctacccagcccgagaaggtatccactagtaccaggaggtatttaactgactgtgggcatgtggataaagtcaagttgccagtcagtctctgggagagagcccctggcctggtgggtggaaaaaggggggctacgatactggagttagggtctgacatctgacaggttttacaagaggcagtgatagttcttaagaaatgcaagtcctcagggctgcgctggaggtgagccttgacaaactgagagagagccttcctgttagggtggaagagctggtgtaaataggacagaatttgtccaatgtcaggaggtggctgtgaggatgtgggttgcagtgtatgaactccctgtggtgggttgggtagatctgggcctcagagggctgcagccctagctgcttcatcagcccggttgttgcccttagagataatggagctgtcagtctaatgagactggcagtgaataatacctataactttgggtaggtgagaggcctttagcatggctatactatgacctgagctggttatggatcctcctttcctattaagtagccctcactctttccagatagcagtgtgggacaggaggaaatcatatttggagtctgggtaaacatttagggattgtccgtgtgctaattggaaggcatgggtgagagctatcacttcagcctgctggttagtagtgtgggccgggagtgcccgtgcatccaacaccctggtatctgacactatgccatagcctgctctatgggtcccctcatgtaaaaaggagctgccatctgtgtaccaggtataggtggcctgaggtagtgtgcccccttgtatgtgtgaaggatggggcaatagttcctctaaggtttcaatgcaggaatgagatggagaatagttagcttcgggttgaggtaaaaaatttgagatactgaggggtgggcaggattggaaagtaagtgtggcatcttctaccagcctcacctgtaggaaagaactcgagaaggagatagagtttgtaagcctctgtaggttaggagatgagacaggttgtggtgggagaagacagtgatgggtgacccaaaggttagtttctttgattcatgaataaggagctgctaaacacatatgcagggtgcccacccttgggtagttaggtctagtttctttgatagatatgttacaggtgcaaaggaaggtcctagttggtggctaaaactccaagggcatcccctccttttctgctacatagagggagaaaggacaagttaagtctgggagatgaagggctggggcctggagaagagcctgttcgagttttggaaagggcttagtaacagggttaagaagaggttcatgtggagatccaagagctgcctcatataggggacgagcaaggagagagtaagaggaggatccaggagcgtaagaagccagctgttcctagaaacgataaaatctcctctttagtagaaggaactgcaagagactggattaggtttttttctgtctaaggtaatagctttgtgagttggggtaatgattagtcctaagtaggtgacctgaggagtagagttggatcttagaaggtaagactctataacccctgctggacaggaaatttagaagagaggaggtgtcagtctggctaacttccaaggacaggctgcaaagtaaaatatcatctacatattgtatgagcttagatttggggagagacagagagagcaggtcagaagccagagcccggccaatgtctgtggcacatttctgaggcatgttctatacagttccccaaagaatccccagcaacacttagtctcagccgtccatggcagcaatgagcacaggacatacagtttactgactttccctgacccgttctcctcaaacccttacccctgccaactcttaagtatttccctgcacccaagttcctgcttcaagttccaatttgagggaagcctaaaagcaagaccaacataaacccctagcatgggacgggaagctaatctaagcaataatgatcagtagctgtcctgacactgtgtagtcccaaagagagcgagaaactgacttggaggtaaggagaagcactcggtgttctggtgactcagtcaaggtgtaaaaggccttgattaggtgaaacaaggggtccatcctcaacgggatgaataaagaatggcgtgctaagtccaaaggaccccccttgccacatcacgaacacggtcgttaatgtccagctaagcctgcagaggtttacattgacctgtgcgtcaagacctgacgccaaagccaagtggatggtgttggcagaagcatcctgaagggatgtccttctgtatatatatttctcctattggttgatgaataaaacactgtttagccaatagccaatagaggcaggaagacaggtggggcaaggagacgaggagaattctgggaaagataggcagagggagagtggaaggagatgccatggagagatgggaagataagattccgtgccaggcattctcatgtaagataaggccaggtaggaatacatagattagtagttataggttaaaagttaagacagagctagccaataagaagccctagccatcagccaacagattataaattaatatatgtctctgtgtatttatttggggctgaagcagctatgggatctggctggaaagaaaattacagcaacagcttcccaccaaggggagacagcactgtgtccgtcatcagacccaagtgctagactctgctgactggatagtgaagcagacccctcccctctcaaccttacttgtgtgtacacagggtgggagagactgtgtctttccgtgccagcccagtcttggttctatgggcactggccatcatcacatggatataagtatttgtcttactttgggctgccagctcccaaataatgacatggagattttttattaagtatgaaagcttggccttagcttaggcttgttcccaagtagctcttaaaacttaaattaatttgtattaattaattttatgtttatattatatcatattaattttacatactatataacacatttatattaatatacaatgcttatattagtacatgttttgccatgtggcttgttacctcttctcagtatcatatgtctgacttcattgagtctggctggcaaatctcctgcacctcagattccttcccagagttcgaatctctgcctggaagtcccacctatgttctcctgcttagctattggtcattcagctctttatgaaaccaatcagaaggtgccttgggcaggtgaggaagggcagagatgcatcttcacacggtgtataaaaagattatcccaacaaaggctcagtacccgtggccttcagcttcatggcgttttcctgctggtgtggagggctgagctgccctgggacctctgtcacacagagaattaatactcgtgagctttcaccggcaagaccagatggccaactctctctgcttcctctggcagccattcatatagtgtgacaaaattttaattgcagttttattggattgagagagtcatagagaattaataaagcacacccttgtgtgtgtctgagacagcattccagagacaatcagggcatgagggctttgacataaggagggaattaatctgtagatggagccccagctgagcagactgagagtggtaggaatggggagatggatccagttggaggatgagggtccctggggtcatgcctttgaagagggtgacggtttgaatgggaatggccccataggatcatatatttgagtattcggtggacagtcagtggaattacttaggaaggattatgaggtatgaccttgttggagatgtgtcattggggacaggctttgaggtttccgttccattcctggctgtgtatgtaaggtattacaaaacatgagtttcatatttaaaaaatgacttgtttacccaagacatctcctaaaatatgtaaatattctaagctaaaatagaaactgaagccccaaacacttctggtcccaagcattttagataagggttctgatcaccttgaggaccaatctcacgccaactatttcccctcatttcctggctcctcactctgattcctgaattataataatgaaaataccccctaaataaggtccttgaacacaggcctttacctcagcctctgttgtctggagaacctatgctaagacccatattatctggaccactctctgaggtcagaggaacccactgtgctcccgagcttggcggcctgatagtcaaggtgtcacgcctggagtcaaggggccagagcttggactaagaaagaaaactagagaagactggtatgagccaagtgcagaacctcttgtcttatcccatttcctacaactacagtaatacttcagggtcaccacttatttcatcatgaacaacttttgactcatactgcagagcagactggctgagggcatgacaccgacatctggaagcagcttgctgctgtgtcaccccttggcagatggaatgagagcaagaacgagaagggaaagaggggacagcctcatcagcgtctccatggtgacattgattcactaattgctgcttgttagactccgtctcccaatatcacaatggggatagagtttccaagacataaatactttggagggcacacttaaaacttggcatagaggaggcctgtgtctaccttgcaataggtatttacttctatgtccttaaactgccccactacccttgaactcacgaaccagttgtacaaatcaaactgaacatctcccgtttcagctatccttgtttacacaagtgagacggagaagttagaacagctgggtggtacagtcagcctttgacagggtagaaatgatcctagcttttcccataagtacaattgtccctgatttgttcccctggtttgaggtccccacctaacccccaagtcaggcttgggaagtctggtacacagcaaagcaacccaggtctgttcccttgtgctggctggggacaattcagctaccaggctggtggtttcacagaggaaagcacctgagcctggagttcctgttggaagtcccctcccagtgctggggttgggcagccccccgccccccagtttcctcttatcctttgcagcttcctcccctcctctggtcgtccttaccacacctagccttaactccaggaagagaggccaaaggccacaagctgatagcttgctgtaaaagtactgactataaccctgttttcactcccagtgttctattaaaaaattgttttaaaggaaatttcatgtgtaaatccaggtttctggcttccatgggaaaatgataatctttggcacctgttggctgaggagtgttgcctgctatgcatgggacacttactcatccatctgagatgttgcctagggcttcacatctggcctttgtaggcattttggaataagcattatgtttgtcccattagttcactagctctaactgagcaccaaggacagtccttgttctagactctggaactcagaagttgcaacatggactatagtgttatatttgggtggaggtgacacaattctgaacaatagaatcatttacatttagtgtttccaggtggcaataactgctgtaagattaaacaccaggtagaggacattcaaagcagtcaggtcctggtggggacaagggaggtgtcactttggagagggtgtctctgaagtcataaggttggctgtaagcagtggacacttcccaaagtcaggaggaggaatttttgtcactaagccacccctgttaggaccattgaggcaagggaatgagccgaaaggccttttggaatattccaggacaaacaccaagcattcttacttgtccttacatatttctgaattcaagtaatagttaaacacaaagagtatttagtaagttcttatttttgttactgcaaagcagataaaattcaaatctggcattcatgattccaggagggtgaatcaatcctcctttgtccccatattttggggagctgtcttgtctgcattagtcagaggcgctgcagccagcctttctaatttgattcccagagctgatatggctattcttgaagctccttttctggggtatgatcttagctagtgctcaccaggcccaagcgtctgaccacacacacacacacacacaagaagatttggttatccatgtaaacatgatgctgccatgagttaacttttctattttgagaagcatgtcagctcgaaatacctctaccttgtctcagacgcatgcgtgctgacagagttgccaaaattgtcccttgagtaagtggcagctttaaaaccaaccagctggggactccagagcagaaggtcagcatagggaaatagaaggtggattctgaaggcccaagccgtccagaggagtttcatagtggtgggattttgaaggcgcgagaagctcttgatcttgcctgttgcttctctctgtctcccatactccaagatgaatgtgcaggcctgctctagatgtggctatggcgtttaccctgctgagaagatcagctgtatagaccaggtcagtagggatcgtctatggtctttgggacatgtgtcctctcacgagggaggaagcagtctgcctcctcaggttctgctcatttctatgtctcctgtgctgattcaagaagaaaactgtttcatttcaacatgctcttctcgtgtgcatagctcatgaattttagtttcactttatccgcaattctcaactttttaccctaacgttttttgagccccgaatctggaggaacaccactaacggctggatcttttctgtgtctctcagacatggcacaaggcgtgtttccactgtgaagtctgcaagatgatgctttccgttaataacttcgtgagtcatcagaaaaagccatactgtcacgcgtaagtgtctgataaccggctgctacagcttgatttctggttttcaacaagtagccactgggggatcgggttctaagctccaggctggactctaagcactccctcccccaaagtgtcactcatagctagtcacggaagagccccaacgtgggactttaggcgaaagaccagctccacccactgtaactgtgtgccagtgtaactactgaagatatgggtagacaggagcttaaaacgtttctcttacatggtgtccagatccatgaccatcctcagtggaaacccatctccatgttacatgtgtggaatttacttggtatgagtttttgaggggtaagattcagtgggaagtcaagagctgaattcttgagttttgtgctcctccctcttaagagaccagtgttctaagatgtcacttgtccccttggatcaagcacttttctaattttgatttgcattacatttgcagccataaccctaagaacaacactttcactagtgtctaccgcacgcctttaaacataactctgaagaagcctgtggcagccacgggtggggtaagtcactcagctttgcattttgcaatagctgttagggaatccctgggctcagagtcctgctgatttttaggcatttcggtctatacacagatcagttcacttcctcctcatacacacgcaaagtgcttgttagtgactgatggctaatgctgccctttgtcctaccgtaaccttagaggccaggccacagtggtatcgcttcatataataataggaagttaatgcataggacaaagagcccttctttctctccctcctctgtttggagtagaaaaccaaagccctccaacttcacgctccagagcttccttgagctgaatagtggcttacaatcatctataacctcaccactccccgttgtggagaatagctcggagatattttgagaaatgaagtttgctttgggaggtgggtgagagggctaggcagaccaggatggtgcgtgcgtatggccaacagcgagcccatccagctgtcacccatccagctgctggagccatcgaatctattaatatgatgaatcattggccttctcttgccaggcccatgagacactgctgtttctaaacttaggaattacccagcaggtggaggactctctagtaatctcttcaccccagagtcccttcctggtatcgcccatttgcaccgactctggtgctcactggactgaactgagaaagtatgttaatgctgctgcccttgcagcatttggcgctgcagccactgtttccagacttccttaagtgctccccaagtgctctgcattgagtttgtatttaacaagtgtgtgtggcactgctcacatcactctatacacattgtaacccaggggagcagatattattcttatcccattctcctagagaggagcctgaggctcagagacatcatacaacctgcacaattccatccagatctctgtgtacaaatctggatctgtctggccatagagtccatattactggcccacttgtgcacatacccagaaggcaacaaactacaaaagccaggaagatccaaacttcatgtatccagatggttctgcagttgtgtacagggagaactacttgccctcagaatactgttggtgtgtgtcacactctgtgtaaagtgtcctatgccgtctgccatttcccagcttcccctcaagcctcagccggcagggctacctcacggttacgcaatgaagcatgcggtgcagcgtgtacctttccctgggtagcagtgggctcatttccttttaactgtgtgtggcagacctaatctggaaggatgctagggtcatctgtcattctctttcagaccataggcaggaatgccagtttcccagaatgcccgagtgtgtctgtttgtttgcatccatatgactatgtgacaatgtgtacaaattcatgtttgcacatgggcagtgtgtatatgggtgctggcaagtgtgactaggcatgcatgaacatacaggcacatggtatatgcactgctatgtaaatgcacacactgtgtgtattgtatgtttgtggtatgtgtgtatagatacacaagtgtatatatatgtggtgtgcatgtatgcatgtgtagatttttctgtgtgtgtgtgtgtgtgtgtgtgtgtgtgtgtgtgcaagttatattcctgtgtatactggaatattgcagcatgaatttttgttcatggatacaaaacatgtgtgcacatgtacagttgtgtatgttatgtacatgtgtatgtgtgtgcatgcatgtatggtgtgtatagtgtgtgtacgtataaacaatttattattaggaccccattctcctattttttcattaggaaaattgaaatgaagaatcatgcccttctaggcctcaaatctttgaactaccctagggcatgtgatgaatgaatttttcaacactgcctttccacctctctgagagacatggccaattcaaaaagagataaatgcattgcttatatgctaaaaatttcaaaaggaaggaaggaaaaatgtattccagtgacggtggtgacggggactttggataaagactttaagctggcctttgccacagagctatgattttctgcttcacaaatgtcactctaaaaaatgaatatttattaagctagaacttcctattttctcagagtggatggaatttctagaaaagttacctggcagctcacttctattcagaatgaccttactcagcatcggcagtggcatctgcagcctttggctgtccccctcacttactccccagtgtggttgtgactgtcactcagggcttacagagttgggcaagggcagcaaggcagcttcctgaaagtggcctcttgttttggccacatgttgcttattccttaagtcacggttctccagcagggtagtttgacccatgtaggacagcatttactgactggggacatttgccactgtcacattgggagggaggaattatcgtatctggtgggtaagaactaaggttgctgtgaaatgtcctgccatgctcaaggagtccctcaatacaggggcttacctgggcctatgtatcagaaacccattttgaggctccgttctgctcacaatggactctccaagcccagtgagtgacgtgtgcaaagctatcccagtcatgcactgattgccacctgtgggtctgcaccaggcattaatcagcagcaggcctgggaagtcaaagacagaaagtgcccttgacaggaaactggaattcctaggtttaaatatttttctctgcccttgtttctccattgtctgtaaaactggggatttaaccttcagcttgtaaaacctgaagtttagtggccccatctctgatccaacaaattgtgatatcttggctttggccctaagaactcgttgatttttctcttatggtgggtgagtcctgccacagttctctttaagaacctttgcatttccccaaacccatctgaatgtggacatgacatctgtacctcgtatctttgccatcacagttgcaatcacggtgtgatttatagatactgccgattgcctgtgatggtgatgtgaaaattggagggctcccatttttagaacagagaaatttttagaacagaagatcttagtctaccagttctcaagatttactataaaagtaatatctagtcatttagtggacagacacaaagacacaccactgagtgagaacacagagtctggcaatgagttgctcatgtgtggtcacttacaaaacaaaacaaaacaaacaccagtgcagttcaatgtggaaagaatgctgttgtggtcacatgttggagagattggtgtttgtacactcaattacagctaaatggctgaagactagataggggtgtgtgtgtgtgtgtgtgtgtgtgtgtgtgtgtgtgtgtgtgtgtgcatgtgtgcctgggtgtgcacatagaggttagaaggcaactcaggggagctctggggattgagctccggccatcagacttggtggcaagtgccttcagaagctgagccacctctagctttttaattgcaccgctcaatagagcaccagagctttacaggaattcaatccatgtcacctggctggtggcacaaacgaggccacagtgggacccataacgcatgagctttgtgataccgctaagatgcctcctagctgagccttgggagaactgccccgattcagctgtgcttcccttattttctctcccttctctgatggaaggaactgttactgaccacactttcacactgtgcagatcagtggccaggatggtgagcagtttaaatccgttttccactgggacatgaagtccaaggagggagcaggcacacctagcaagcaaccactgatgagtgaggtgagttggaaggagaaaaggatacagactatcaaaagaagatcaccattttaccacgtctaaggaagccactggcacgggttcccctcttccatatttcttgtccccagtccagtgtgccaatcagtcacacagtttcttggatgtccctgacctaccttcttctggcctgtctgttgatgacctgctccttaaatatccctaggcttttattctgagtatttgcatattctcaatgtaaaagaatctaatgcgaatagagctaactctttgtctccaatcccagttcactcagttccagggcccacctggctaatcttgcagctagccttctagaatttactgtgcactcctatctgtctgatatttctgtttataaccatcccctattggtgtctatcaatcagatacctgtctctcaatgtcctgtccttctctaacttctagtacttacttttgggcacacctactaccttcccaaaggtcctgagctgagttacttagccactctttttaaaatttaattcttagttttgaattataattttgtacgtacacatattatacacgcatataatgaattttagtcattattgtgcccctattatctcatgcactgaaagccctctcaagtcaccttcctactttcctgatttcctctctctctctctctctctctctctctctctctctctctctctctgtgtgtgtgtgtgtgtgagagagagagagagagacagacagacagacagacagactcactcactcactcactcactcactcactcactcactcactcactcacagagtttaattgacattacaggcatgagcgtgagtgggaggttgtttactggagtgtggactacactcagtagctacaccgctgaagaaaatgatacttcctcacccaacaaccattaatggctaatggtccctcagggaaggatgtgacatcatgggttcttcccttccatggtgtaatgttgcagggaccagtcttgtgcagatagcaactgtagtgagtcctgagaactaggttggagagacatctcctctaccgccagacagggtttctctgtgtagccctggctgtcctggagcttgctctgttaaccaggctgcctgtgcctcctaaactctgggattaaaggcatgcaccaccacaccaagctgcaagagactttgtttgttttatggtggcccattttctcatcctccagctcttacattctttcttccccatttcctgtgattttccttgacgcttggagggggtgatatagatgcattttgggctgtaaatctactgtcatttattcctggagcttggaccggttataagtctgtgccttaaccgctgcacgtgtgatgaaggctgagggcatccctaatctgtggatataaacatcagtattcagaagaggagtaggatgcctctcgtgccagcgacctctctggccctggtatgctgaccaggtcacagtgccaggtccatgtgtgtcataagttccttcctgtggagaaagagcctcaaatcaaaccagaaagcaatttttatcacctataaagtaaacttaaaaaaacatgttaacccacagggctattgtgaagattaaagaacagataaatgcaaagatgttagaatatgggctattataattatatgccaatgtattttttcattaaccagtgtgcattattttctggctgttttcattttctttccatcccacagaccctttttcgagacagggtttctctgtggctttgaaggctatcctgagctagctcttgtagaccaggttggtcttgaacttacagagatccatctgtctctgtctcctgagtgctgggattaaaggtgtgtgccaccaccacctggctccacagactcttgagaactatttgtatatcagcactcttttgagctgtacggatgggtgtcaaggatgcacaattgagaccagatggagggtgtcaccttattggtaggcagggctgtctgctcttacaaatgataaagttgcaacagtttacttttctttggctacagcagttgcttccctaggacccataatggaaaatgtggtcttaatgtcctagtgtactgccttttaattttcactgaggttgtcaattgctctcttacaggtcgccttaaaatgctttattttccctaaagtatgtgtaagcatgcaaatgttttctagttgctgtttactttctttgttttattcctgaagttttacagcaaaatattttcaaagaaaaaaaaattttttctttttcctttgcttttcccattggcaatcttcagatacaaaataagtagttggcttttgaagttttcctgggcaaagctgacttacctcagcctatggggacttctccctgcctagtcttaatgaatagaggagcaaagaaatgttttattgcatttggaaggtttctgtaacacagaagatctcagggaattgggttattcaagatgttaggtctttttctagtctgagtcctagcatgtaggggcaactgtcttnnnnnnnnnnnnnnnnnnnnnnnnnnnnnnnnnnnnnnnnnnnnnnnnnnnnnnnnnnnnnnnnnnnnnnnnnnnnnnnnnnnnnnnnnnnnnnnnnnnngtgtgtgtgtgtgtgtgtgttggacagtcaagcatgcagggaatacatctggatgcatgttcctgctttctttcttcatagagagactattggccggggtatggagaagggagcacttggtgtccaggagctctgccagaccctgagatcgtaaggatggttgaagctcagtctctgggtgaggtaaggacttatgaaccacttacaggcagtggacaatgatctgtgttatacatctattttccttcatttttaagattgtgatagacagaacacctgccacttgtcaccgtggcaaaaacacctgacagaaacaaagggggatgtttgattttgtctgatggatgcagggacctcaatcagtgatttgttcactgtgtctttgaggaggcagagaaatcagtctagaacctgaagtagacataaccttcaaacactggtccctagtgacctccttttgacagccatactccatctctaagggagccatcccgccctctaaatagagctacacagtaagccagggaaagtgcttaagacaagaaaagctaggaagagggtagtcgagctacaatgcctctctccccaggatttccacgtcccactctgtggatcccatcactcacacgatagagacactgtgcaggtgtgattaagttaagggtctggaggtgatgggaagaacctggattctgggtcttcttgtcctacaaggctctctctagccagtagccagggaggtcagagtcagagaaaagtcactgtagtgacagagcagagatcaaagccatgtcgggtgaagaagtgaagaatacaggggcctctggaagatagaaaagaatgagacaaattctcctcttgttccaggaggagccagtgctgatggctcaccccaggagtgccccattgaagaccctacttgtgaaattactgttagtttttgtaatttgttcctttggaaaacagaagcaagagaaagttatgacgtcatgtctctcattagaaaagttaaccctcgggttgctcagaaactaaggaggaaaaatgagccatctcctttcctgtgctgtagaattctccctggagataggtttcagccgagtctcctggccgtgttatgatacaagggcagccaagagaattgtgccaggctcctcctaatatgatacaaacactggggtgaccccctttgacttggagaatatgggtcctcagtcttgatggtgttattcaaggaccatgtcccaacttaccccagcgattgtttcccatgaatgggatgagtccagcgacactgacgttgttgcagttttgtgagttctcacgccaggactgggtggttgtcatgcctctgtggttcttcagcagggctatacagaagactatgaacagccacaaggaaaaggaagcttcccagccatgatcacacctgcctaccaaagggccaagacagccaaccagctggccagccaggtgagagtgctgggctcatttgtacccttgatgatgctagctcttgacatgaatgtggccatccctgcaatccaggaaatccagaagaatgttttagagggttgtggggaaaccacattttccttataatgtgtcttctgagccttggttgggccacacttacaaaatgtggaaaggggaagatgcagagaccttagaactcacccaaagattcaaggaaatgtttcttccaggttgctggtttttcttagggtggtcactgatctacctggagattgttctagctcataggttaagggctcgggctttagagacagaaaattaggattggaatcctggttctcccaaatattcactgtatagctctggtcaaattactcagcttctctatccctcagcatctcatttgtggtaaataatcatcctgttggatgggatgtgattgttgaaagggtcacatgagtcattagttggtgacaccaagatgcacctggtactctttaagctggcacatcagcacagataacgtttggttgatcttgacttggttggttttgagcatgcccaaaggtttagcttttggagagctgtaaggcagggtcctcgaagaggcttgaggtaggtgtgtcacggctttgactcagcttctccttatcaggttcaatacaagagaggccatgatgagcgagtctccacgttcactccggtggcagacactcctgagctgctacgagccagagctggaggacagcttcaaaatgacgtaagaaacggtgtggagggccggggaaatagatcagtgggcaaaggaatcacacacacgcatcaggcccagagtccagatcccctgcgaccctacagaatccagacaagtgtgccgccccgcctgcagtcccagtgctcggaaggcagagatcggagctcctgggacaagctggctagctagaccagctagaattagagagcttcatgttgtgtgagagaccctgcctcaatacagacatggggagcaatcaaggaagatactaaccatcaactacaggcctctctatgcacagaggccctcacatgtgcagaggaccctgcagacatgtgtgtacccactcaccctcatgtgaacacacatttacacatagacatgtaccacacacacatacatgtgaacaatgattcagtctaaggcatggtggtccttccttaagatccctcatacttttgttatctggaggagagggaaggaagactggaagacaaaccgtggtcccgggagcctgggtaccagaaagagctttctgaggtcacatgccttaagtcagtcctcaggggccttgcaaaaatctctgtgagtagattacatcggattatccttgtacccaggcaggtatctcagatgcagatgatagaagcctctccggccactgcagacccaagtggctgacttctgaggatgctctgccacgtaccctttcatagcctttttgatccacaatgtgctgggtctaagaaccaagtgtggttctgacggaagactggagcacaaacccagcttcacgttcccgggcagcctccacttgccctggttgaggtctgtgattgagatgcccactttgagtcccagacctgacatcagcccttctgagtcaaccttgctgctttgctcagccccaacactggtccacgccggctgcggaacagggatgcgttgaactctatactgtgtgtccccatgagccaggcattgggcatgaacaggcagataagacaaatgtggcccaccaagctgtaaggaccattcaaggtggtaggcaggggctcatggccctcagatggtctagcaggactgcagcgggcctttgtctgtttctttctgactgtccaggtgagatacactgaagactgtggagctcagagagggaaaggcagttttcccgccatgatcacacctgcttaccagatagccaagagagccaatgagctggcaagtgatgtaagtgcccctagctgcgttgtcatgttaaggaggaagctggaacttaacctggatctggaagtccaacttcctgtccattttttgttttgttttgttttgttttgttttacatgcttgccagagccaaggagtaccttttcttcattgttgtcaaatcattttgcccgtgacagtgatttgccactcatgtctgagttgtactccttagacccacgcaagtctgtatttttattctgtggctctcataatgggactcactgaattttttcttaccctctgaacaggtgaggtaccatcaacaatatcaaagggaaatgaagggaaaggctggttctgtcggagctgagggcagggtgacaaaggaatgtgcagaccagtatggccaggtatgtggtgctctgggagtggccgtggtcttctccaaggccagtgctgtttgttccctacagctgtgacagccatgggcttatggtcagggtttgggcttaggtccaaaaagtatacagataacaaatcccaagcaccttgaaaaaagaccccaagccagtgtggtgacttggccaataagatgttttcattttcctctgttcactgaggagcgattactagtaatgaaactgattttgttagcactgcatgagcattgaaagggatcaaaatgtatgtcttgagaggctggggagatagcttagtgggtacgagtgcttgctgtgtgagtagaacttcagttcaaatccccaccatccacatttatagttgccatgtacaactgtaactgcagtgctatgcagggtggagattggggcatcacggggctcactggctgccagcctagctccagtttcaatgatagaccctgtctcaagggaatagggtggagcatgatagagcaggatactagaagtcctcctttggcttctgtaccatgcaaacctgcacacacgtgcacattcaacatgtgcgcgcacacacacatacacacatgcacacacacacacacatatatacatacacacacagacatacataccacacaaatacacacatgcacacacaaacatacacacgtacatacacacacagagagaaacacacacatacacacacacacactgagaaacacacacacagacacacacacacacacacacagaaacatacacagagagagaaacattctctctctctctctctctctctctctctctctctctctctctctcttccagtatttcccacctgtgactttgatgacagtctctagtacacataatacacagggatgaataaatatcaatcacactgagtctgttatctgtacccttctgctccctgacctgatgtaccctggtggaaaaatgggactgggaacagggcttgagatttttagaatatactgctttatgtagcaacccaggtgaatcatttacttcctaaggaagttattcagtgaaatacccaatatttttcaagatatgcagtttttggtgtgtgtgtgtatatgtgtatgtttctctctctctctctttgtttgtgtgtgtatgtgtgtgaatgtttctctgtgtgtgtgtgtgtgtatgtttctctgtgtgtgtgtgtgtatgtttctctctctgtgtgtatctctctctctctctctctctctctctgtgtgtgtgtttgtnnnnnnnnnnnnnnnnnnnnnnnnnnnnnnnnnnnnnnnnnnnnnnnnnnnnnnnnnnnnnnnnnnnnnnnnnnnnnnnnnnnnnnnnnnnnnnnnnnnnaaaaaaaaaaaaaaaaaaaaaaaagcctagacactaagtttggcctgtagctgaggtgtaattttgtagtgttctactaggttccttgtcattagagcatgctgaccaaaatttccagtcttaatgatgacaaactcaagaatcaaagtgggtgtcattggatagcaccgtcaacagctgtggagggaactcagtctagcgtggcattttgctgtttgatttagcatgacttgtcagggcatgagtaggatggagttagagtcaggccgataatctataaatatctgtagtgccttaaataccacacagctcattcttgctgatgactagctgaacacatgaaaaagactaagttatgcaataaatttgttattcataaccaagcagttccctaataaaagttagtaccttacaaaaagattcacacacacagacacacacacacacacacacacacacacacagacacacacacacacacacacatacagacacacacacacacacactaaagccaccaacacaaaactagacagcagaaaacaaaaaccatggaagcagccaccaaaaccaaacaacaaacttaaatccttgtcatccctccaaacttactttttttttgcttactatatttgacccaaaacactctggcagcaatgtaaaaagggaggctcaggctaaccaatttttcattttggtggtaaaagaatcctggctacttaaatttgattcaagaatcttacctaagaaaatgtgtgtgctagagtctattgtggttctctggaagatgggctcttgcctcagaacctcgagggtccagggagagactgttgtgatcccaagagcttccgtaggactgctgcacgcatgccctgggcaaagtgccgatgaagaagcagctgattgtgcccagggcaggtctgggatgaaaggtcctgggacttccacggtgcagacgacttgactcaccacaccccgcctcactctcgggatgctggccttgtaagaggtttttctttctgagagttggagatactcaggaagggaaggaaaatttaaaatgagagtgatagtccttatttttcagcataaatttaccccatttcagagatggacagcaacacatggttcctcttcacaaagttacagaaggttttgtcctatttgatttctggtttcacaacacacatggctgatgggaagcagaatggaaatgtcacagtgcccttctgcacagatctgctgttgggtctaactaagcaatgtttgagataacagaatacagccgcatggtattcaataacactgtgggggtgggagagtctcctggcttgtctgacagtgtgatgactgatgatgacagatgtgtatgtatgtttatgtgtgtatgtatgtatgtttgtatgtgtttgtaagtatgtatgtgtaagtgtattatgtatgtatgtgtatatgtatgtgtgtatatatgtatgtatgtgtatgtatgtatgaatgtatgtgtgtatgtgtgtgtatgtatgtattacatagtggtccaggctccaggatctagtgtcttatttgccacatggtatatctctggcagtcactggaatgtcctgtgtggatgagcttttctgagagtagtcttttgagctgtcactgctgagcaccacccatgccaggagggacacattactgactgaagcttttggttgactcatcaggtttactcagaagagtgtgatgaacctaggggaaagggcagcttcccagccatgatcaccccagcttatcggaatgccaagaaggccaatgaacttgctagtgatgtaagtactggcagagtcatggatgcggaggtacaagaatgaggagggctgcacttactgaaagccatgtacagacatctcttagagccaagtgaaagcagaatgctagtctggccccaggtccaaactcatggtgtcctcttgatctgcccatagactttgagtccctttgactgtgcatatggaaatggagctggacaaattgccctgctcatttttatcatctgaaaaggcacaaatgctggtccaagcagataagtgggaccaaagcccattgtgaaaccaaaaccccgttttgaaattgagccttttagggcaaaagctcaccaaaagaatatagt

SEQ ID NO: 37 - DNA, 94597 bp, Cricetulus griseus
  >scaffold_36 dna:scaffold scaffold:CHOK1GS_HDv1:scaffold_36:7709296:7803892:1
  misc_feature 7034..7133: /note="n is unknown"
  misc_feature 8179..8278: /note="n is unknown"
  misc_feature 10139..10238: /note="n is unknown"
  misc_feature 17533..17632: /note="n is unknown"
  misc_feature 27146..27245: /note="n is unknown"
  misc_feature 32729..32828: /note="n is unknown"
  misc_feature 34522..34621: /note="n is unknown"
  misc_feature 39748..39847: /note="n is unknown"
  misc_feature 48613..48712: /note="n is unknown"
  misc_feature 71537..71636: /note="n is unknown"
ttttgcaaagggcagtggttaatgcaatgactcatgactggccaaagtgcagtgtctatgaagtgctttttcctaagtggatgctctctatcatccttcaaggctgagggaacatcacagaagagaaggcagaaacaatgcaaagccagaggttggaaggagtgctgtgaaagagtcttatagacatgacgtgcccactgcagtcatccattcaccacagctgtgataacctgcacgagactggacccagcatcatttcatcacagctggctaacaagctcaataagccccatcactccctgagggactatggtaaccaacatgcactgaggagaaagcatcattttcttcagtggtgcagtcactgataagttgtcaggctccaatatgtaactagttagtctcagactcacactccagtaagcaaccataattaaattcagtgggtcagaaaggaaaaataagtaggagggggcttgtcaggaagcagggcttcagtttttggtgggagtgaggataagaaacatctggattttgtgaaaactcattatacacatgtatgaaattgtcaaatttttaaaagaaaaaaaaatgaaggtgttgaaatattccagattaaaggctctaaaaaaaaaacgactattaaatctagtagttaataataaactgcatcttgtattagggggtatcctataaagaacacttctgggtctattaaattagctaagcctggagtgaatgaaattgttaagctatgtaagatagttacacaatgactacaagaataccccaatcttgcaaagtgtatattgaagtgagaggcaaaagatacatgtaaggggtgtgcgtgtgtgtgcgtgtgtgcgtgcgtgtgtgtgtgtgtgtgtgtgtgtgtgtgtgtgtgtgtaagtgtaataaaaaaagtacaaagattagaaacaatcatttgttctcattgggaaatttttttctgtaaaatcaaaattatttctaaataaaatctgaaaagtccatcaagtgagtatatgtaagcacttaaaatgacaactgaagatagagagatgctaatggttaagagcacagagctcttacaggagacaaatttgcttcctagcacctacgtcatgtggctcacaaccacctgtatcttccagctgcagagaatgccttctgcccgctcgcccccccccacacaccgtaaaagtaaataacaattcattaataactagaaaaaaattactcctatccatggagtaaaacactaaaaatcttaaaggaaaggcattcaagatctactctgagctgggcacagtggctcatgcttgtaagtctagtactcagagggcagagaaaggagagttacagcaagttccacactggcctagtcgccagcattgaggcagcagggtcttgagtttgatgccagacttggctacacttgactctgaatgaaaaataaaaattattctagatgggtgtggtggtacacatctataatcctaacacttagaaggcagaagcaggactacagcccaatgaggccaacctgatctacagagggacttttaggcagccagggacacaaagtgagaaaatctgcctaaagttcacaataggttgtttcatcctattccggagatactatcaaggcaggcctgtgaattactaaaggaagctgtaactccacaactacttcagagttttgtacccagagcaaaacattccaaaagcatgaggcagtttttagcaggtcacagatttctttaaatttcttgtcattagagtcatcaagtgaagggaaggacagaagccaagacagtcacagaatatttaatttagtatatttcagaacaatgtataataaatgccttatgtagtaaactatggccaatgaatggcagccatgagtggaaaaatccctctccagccttctcttctgacctttccaaggcatggcaggtccagaaatctggaagttatccaacatgacaacaaaccaaatgtgtcttctttaaaataactgagatcaggggcaggagagatggctcagttgctaagagcacttgttattaggaggccctgggttcacttcttagcacccacatggtggttcacaaccgtgtcttaactccaatttgaggggatttctgactttgtaggcataaagcatcaacatagcagacccacacaagtacaagcaagcaatcttacacactatggtagtctgtatgagaatggtctccagtgggtggaactgtttgggaaggactgggaggtgcggccttgttggaggaggtgttccactgggtacaggttttgaggtttcaaaagcccacagtgccattcccacttagctctgtctcaggcttgtgtatcatggtatgagaactcagctacctttcctgatcatgacctgcctgcagccatgcttctcactattatggtcactgactctaatacctgaaactgtacatccgaaataaactttcctgctatacgtgccttggtcatactattatcacagcaacagaaaaagacataaaataaatcaaagaaaaagagtgacatccatatcatcaccctccattaaaacctgcctattctgtcttccagaaaaattatcaggattagcactctgtgtgtgtctgtgtgtctgtgtgtgtgtgtgtgtgtgtgtgtgtgtgtgtgtgtgtgtgtgtgtgtgtgtgtgtgtgtgtgtgtgtgtgtacgtgtgtacatggaagccaaaagagtacactgctggatcccctaatgctggattacaggtggttgttggcctcctgatgtgggtgttgggaacccaaggtcctctggaatattccagcaaatgctcctagcaactgagccatcactccagccgttttccttgcaaatgatgatggagctgaacatggtatatccctgtaatcctagtacatgggaggctgagacaagaggatcaaaatttaagggcaagcttgtgttacatagtgaagctctgtctcagatgaatgaatgaataagagaatgaatgagtgaaatttaattttaaaagggacagggagagaacaatcatttttacatggaattacaatttaatttctttgagctttcatgatttctcataatatcctacattaacgggtacttcttattaaaaggctagcaggagggaccctaaaaagtatatgcaaatcatccataattccataggggattgattctaagacagctctcctctccagccatgaataacaaaatttgaggatgctcaattgccttcaataaaatggtataacatgtacatacaaacacaaagattctctctggattatttataacatccaatgctatggttaagtaagagattaaaaactggaccctttcgaagtactctctaccaggaaaccctatgtaaacaactgtcatgccaggcagtggtggtgcatgcctctgatcctagcactcgggaggcagaggtaggcagagctctcttagttcgaggctaacctggtctatagcaccaattccaggacagcctccatagctactgagaaaccctggctggtgaaaccaaaataaataagtaaacaaatgttatgctatattgttttagggaacaattacaggaaaaaagtgtttgtttggtttgtacaggctaagaagggcaatttttttcattctaattaattttcaatgagtatttggttagatgtgaagattaggacaaggagatacaaggtaaatggtatttgggcaatcacagattcaaacatccgcacaagagacagttgctttcaaatcttttgtttttatcttaggactaaaatcattaaacaaaaatataatcttctgatttttttttcatttacttatttcatcttatgtgtttgagtactttatatgcatgtatgtatgtacgtcatgtgtgtgtgcctggtgctcaggggtcagaagacactcaaactggagttatgaatggttgtgaaccaccatttgggtgctaggaatcaaactttgtcctctgcaagtgaggttaactgttgaccatctctccagctcattattttcaaagtcaattttactacataactactttcctctttactcacattaataacaacttttcatttttctcatagtaaagtatctctttaattaaaaaaagtaccaataagccacttttaagtacatcttagttaaaacattaaagaaatcttactttaaaagatttaaaagtttaaaagaaacgaatgttttaagcaaagcctgatagcaactgatacaaagacatttaacagactttagataattaattctaggtaaggacccgtatctcacagatcacttacataaccatacaactgaaacactaaggtatttttcagcttagaagaaataatgtaaaatctagtaatgtttcttctccatttctaaaaattttcagactagcaaacagaaagctcctcaaaatgcaacaaaacgttagtacaatctcgctacttccatgacctattaattcaattaacactcttctgtagctaaacagagtagttttctcaatcccatgcagggttgcagctcatgtaactagggcaaaaaagcttagtctcaatttttgtttttacttgtcgaactcctgctatatttattgactggactggtcttgaattcctaaaatcaagcaaccctcttactttagcctcccaagtagctgaactaaaggaccacatgttaaggatcccagcatatgctggcctgcccgtcacctggcagaattcagtcaggcagtaccctggtcagcacagatgcgaaggacgctgttctcctggggcagacaggacttttcctgtctccctcttctcttctgtcctctctctgtctctgtctctctttacctcttttctctcccccaccccctttccctttctattaaaacttctcacttaagctgtctgcctgtggcctgtggtgtttgtccctccgcctcggtcacccatgcctgccatggaatacttatcataataccacacctggctttactttagtattttatgctaactgactctctaaacacctcctatgaacactggcattcatcatttccccttgactgattctgcactcaaacctcacctatcccgtgtaccagattaggtgatggctaaggatagatgatgtcctgagggtaggaaccccgaggaagacgttcgctgtcaactgggcagaaatgaggccccatcagaactcaatcatgctgataccacaatcacagacttctatcttctagaactgtctaagccaccaatctagggtactttcggctgccctagcaaactgcaacaaggatactgtaacagcaaaactgtcaatactccaatctgatttctgatgcctaaaagcactagtttcatccatcctttgaaaattcagcagtgtgtttttgccagctctaacagtaaaatgagactttccacagccttatgagacaggcatgatgtctactgctgtgtatcatgaaaactcattcacaaagaaattggcaagggaaaaatgacggacaatttgtgaataagccatctttcttgaacaagaacaaaacaggtcaaatgtctaacacttggtcattgtaacttaaagctgctaagaaacaccctctcacacataaaacactcaataaaaatacacaacacacacacacacacactcactcacacacactcacacacacacgctagggaagcacttctacactgagcccacaccaccagcccccaccaaaatgattccctcctgactgagttacctcaacacttttttatgaaggaagcagttcatcgtgcagacaagagaaagaaatttcacagagaaatacttaatgttcaaagaccatccctgtctcctttggcctacaaaacgacagagcacagtcaaatgtatcaattctaaatctgacgcattaaaccaagaacactcaccaataacattgtgctttgaactgaagggatctacaattgtttgatctcggtagctccggaagccctggatgatcacctgagagagaagagacacccttcagaacgcacacagagagaacctcgatggcaacattctttccacttcttgcttctcactcaggccaggacggaaacgtctctctcgtctctggagcgtgcaacttaaaacccttccgattacctatctgcagcctctgcggtgcagcgctgccgagggagaggcgaccgcggaattaaggggtgtgtgtgccgcgtaagcacaacggcgggcggaccctgcagcgcgccggcaaaggtgtagtgggcgggcgagcattcgagctgctcccggctggctgactgcaagcgcgcaagcgcggggagggcagctgtcagtcagaccggcccaaggtggggggaggagagagtgtgtgtgtgcgcgctcgtgtgtttgtgtgtatatgtgtgtttgtgtatgtgtgtatatatatgcgtgtgtttgcgtgtgtatatttattcgtgtgtgtgcgtgtttgtgtgtgtgtatatatatgtgtgtctgtgtgtatgcgtgtgtatatgtgtttgtgtgtatatatatgcgtgtgtattcgtatttgtgtgtgtatatatacgtctgagtgtgtgtgcatatatgtgtgtgtatatgtgtttgtgtgtgtatatatgtgtctgtgtgtatgtgtctgtgtatatatgtgtgtattcgtgtgtgtatataagtgtgtctgtgtgtgtataaaaatatgtgtgtttgtgtgtgtgtatgtgtgtgtttgtgtgcatatatgtgtgtctgtgtgtgtgtctatatatatgtgtttgcgtgtatatatgtgtgtgtatatgtgtgtgtctgtgtgtgtgtatatatgtgtgtctgtgtctgtgtgtatatatatgtgtgtctgtgtgtttgtgtgtatgtgtgtgcatgtatgtgtgtgtgtgtatgtgtgtctgtgtgtgtctgtgtttgtgtgtatatatgtgtgtctgtgtgtttgtgtgaatatnnnnnnnnnnnnnnnnnnnnnnnnnnnnnnnnnnnnnnnnnnnnnnnnnnnnnnnnnnnnnnnnnnnnnnnnnnnnnnnnnnnnnnnnnnnnnnnnnnnngtgaaataaagttaaaccaattacaacagcacattcttttttttaaaaaaaataagaatcacatttatatatgtcactaacatattttgagacaaggctgaaaacacattgctatgaaatccattttttttaaaagattttatttattatgtgtacaacattctgcttccatgtatatctgcacaccagaagagggcaccagatctcataacagatggctgtgagccaccatgtggttgccgggaattgaactcaggacctctggaaaagcagtcagtgctcttaaccactgagccatctctccagccccacaacagcacattcttataacacaaataataacaacccagagacagatactggggttcaagctgaagatcagagaagcaaagcagccaaccagtagtagctcctacctctacaagggcagatggagatcctggcttctgtgtacctagaaactaaatctcccaatgtgtctggagactaattgcctaagactgaatgccaagactgacggccagctctgagaccctgctccttcctgtcttatagacctctctagtgctgggattaaaggcatgagctctgtttctcttttagcctgattcactctcatgtagtcctgggtggccttgaactcccagagatctatctgtctttgtctcctgagccctgggattaaaggtgtgtgccaccactgccccagcttgtttggctgtggctagctttgcattctgatctccaggcaagctatattagatcataaataatatatcaccacacatacttttttttcaaatgctacataaagtcccattttatttttccaagatgttttttcttctgtcttcatgaagccatctctttccatgggctttggtggaggttgtgatgcagcaccagcaggtctaaattgtggtggaggtgttcagtccttccaggcttctggagatccattcctgactactttgctatgaatagcacagctcacacagtaatgcagcttgacatagagtttgggaagcacataggtgtccaagacnnnnnnnnnnnnnnnnnnnnnnnnnnnnnnnnnnnnnnnnnnnnnnnnnnnnnnnnnnnnnnnnnnnnnnnnnnnnnnnnnnnnnnnnnnnnnnnnnnnntgtttgtgtgtatatatgtgtgtctgtgtgtttgtgtgtatatatgtgtgtctgtgtgtttgtgtgtatatatgtgtgtctgtgtgtttgtgtgtatatatgtgtgtctgtgtgtttgtgtgtatatatgtgtgtctgtgtgtttgtgtgtatatatgtgtgtctgtgtgtttgtgtgtatatatgtgtgtctgtgtgtttgtgtgtatatatgtgtgtctgtgtgtgtttgtgtgtatatgtgtgtgtatgtatatgtgtgtgtgtctgtgtgtgtgtgtatatgtgtgtatgcgtgtatgtgtgtgtctgtgtgtgtatatatgtgtgtgtctgtgtgtgtatgtgtatatatgtgtgtctgtgtgtgtgtatatgtgtgtctgtgtctgtgtatgtgtgtctgtgtgtttgtgtgtatatatgtgtgtgtctgtgtgtatgtgtgtctgtgtgtgtgtgtatgtgtgtctgtgtgtgtgtatatgtgtgtctgtgtgtgtgtgtctgtgtgtctgtgtgtgtctgtgtctgtgtgtctgtgtgtgtgtgtgtgtgtgtctgtgtgtgggggggggggtgcttcgcgtctgacaggtccaatagacaatcagctccgaggaggagtgtgcacggggcccacgcctgcggcgggctgcagcgcgggaagaccgttttgacagaagtaaacaagtgtgcgaacaggcgcgacaccatctgccacgagggcccgcgctgcacggggacagccagccggggcccgaggccgccttccctcgcggggccgcggccggccgcccatgcccgcggcccgcccgcctcagccccggcccggcccggcccgggctctgcatgcgccgggcgccctgaggggaggccgggctgcacccggcggacacccggcctccctcctccctccctccctcctccctcctccccgcccccgggcccgcgcgctccgacccacccgcgggacgccccgccgctcccggcccgggagagccccggccgtcggcccccacctgcttgatgtacatggctccgcggccccggcggggagaagcctccacctcacgacagcgacggcgcgggcggccgcaggctgcgagaggcgcgggcgagccccctcccacggctcgctcccctgtggcccgacaaaatggcggccgccgcggaggcggagcccgcgcgccgggcgcgaccactccgggatcacgcggaccgcaggggcagcccgggccgaccccgcgctgtggcgtcgggaaggccccatccccgcggccctcccgggcggctctcgctcgagaacgtcgtgtgcatcgcgccggtcgccgagggccggcggggagttcggctcggggaagcctcgccccgcaggccggccagacccacctccgtacgcggggacgatggtcgcgcccgggcgggggcggggcctgctcggcgccaaagcctggagtgagccgagcgcagccaatcgccgagcgcgccggaggtcacgcggtcgcccggcctcttaaaaagggcggcgcgacggggctcgcgcccgacttgaatgtgtgtcccattgtgacgcctcgggctccgatctcgaacctccgccgctccattcttctctttgttgcctccggcgggctctcggcctcctggccgctccgggaggaccgcaggatgctaggaaaggtggagaaggttctgtgttggatgtcgggaggtggcttttgctttgttttcccgggccagccggcagatagcccaggctgggcttgaatttacctgaacgccttgtcttcatccctccctttcttttttttttttttttttttttttttttttttttttttttttttttttttttttnnnnnnnnnnnnnnnnnnnnnnnnnnnnnnnnnnnnnnnnnnnnnnnnnnnnnnnnnnnnnnnnnnnnnnnnnnnnnnnnnnnnnnnnnnnnnnnnnnnnctcccagcactcaggaggcagaggcaggcggatctctgtgagttcgaggccagcctggtctacagactgagtgccaggataggctccaaagctacacagagaaaccctgtctcgaaaaaccaaataataataacaacgatgtgttaatatgtctccaagtctagaaaggcttgtacaatgccacagagcagtttcttgaaatgcagtagatactggaagcaatccttttaaatgtgtaggatcttttagtcctaggcagtccagcaacttgctctgtaagagcaggttggccttgaactaagagatccacctgcctctgcctcaccagggctggaattaaagcaccactccctaactaaatgtgcgttacagtgtaagaagtagagcccggggctggagagatggctcagaggttaagagcacccactgctcttcctgaggtcctgagttcaattcccagcaaccacatggtggctcataaccatcgagatctggtgccctcttatggcctgcaggaggaacactatatacataataaaaaagaagtagtagagctctggggcactctaaaattacctgctggaaaaaaaaaactgggattgcctaatttggtccaggtcacgttcctgctgcctcaggcagttgtcattctcctgtcttgtgccccactgggaaccttttatctgaaatgttggccaaattctacccaaagtttgaggaaaagacaggaaaaaatatgtttttttaaaaaaggaaatggttctatttaaaaatttccttggggattagcagctttgccccagtcaatttgtgaggtgttaggtatttcatgaaaatagagttctaagcctacagtttctagggatggggctggcaatgtagcttggttgggaaagccccagtctgtcaagcaggaagtgctaggctgcttccccagcacagcatgcactaactagcctagtggtactgaagagaccagaccctcacacagccccttgctttggaagccatgccaggctgcaggaaaaacaaacaaacaaacaaacaaaaaccagcaagataaaggcctctgactcaacaaaatgtgctgagtttcctgaccttcccatcctcccagtcactaggaggtcagataccgtccatgtggcaaggatccatcagaagttagttggtggcctctggacatggtttatagtagtggcctaacaatgagatgcatagcataccaaccgccatgggagggcctataagccatagcaaccagttgaccaatcaacacaagacaggttgcccaagctcaggagtgcaccaatcctgagactgctgcgtacacctagacactccccatgctctactcaattaattccctgcctggaggccccttcaggtgcttctcattccacctgccttgtggactggacagagggcccgagttaacttgttaaacaataaaagactgcttttccatcagaataggtctcggtgatttgggggttcaggatttgggcacaacagttcaagttcaccttctactacatagcaggttggatgagaccctatctaaaaataatgaaaccaccagaacttttacaatggctttgacagcaatacaatgtttgctttcttaggcctgtaacacattttatgaactttatacacttagcttgtataattataaaaatagaaagaaaagactttttttaaagccctaaaataccaaatagtaatattagaaatttacctattgccttgtttatgagtatttattgtctctctccatgacagtaaaattcaagagaagaatttagttttgttcctattgtttccttcagcaattagtttacacaaagtaaccaaaacttaaaaatgaaaaatgcaaagaagcaaagttcttaccacaatgtctggctcatgtatgacaacacttgacaaatacacaaaataccaaatatgaggtggacatcacaaaaagataccattaagcaataaaaaagaattctgatgcatgcaacaaagatgaatgattttttttaatgctaagagaaggaaaccatacaagggccacaaagtactggacatgaaacttcatagcacttcagtcatagctgaaaagtaaagggtacaggtagtttgtatggaaggtgctgtgcgcttctgtcattggtagctggaatgtaaaggtacaggcagtttaatagaaggtgctctcagagagcggagcagtgggcttgggaagaatgagatggagaagagagaacgccagaaactcctactctgacaaagcaggtcctccggggtcagtccttctgggaaactcagggagattagtacatgtatcttagaatgtcctgtcaaagcacagggcaacttgaaaattgccttcagaagcttgacttccccgtggaatttcaactgtacttggctgtgcagcctcccagaagccccagagaaacagggaattgggctgtgttatacagcacttgaggatggagtctcccagtatacaaggagctatctacagcctgctgttccaaggacctgtgtttgggtgggacttggggggaggggttgtttgcttgcttgcttgcttgcttgcatatgcaatcaagctggcctagaacttgctatgcagcccaggtggcctgaaactcttgatcctcttgcttctaggacactgagattacaggtgagtgtcactatgctgtctctctttaatctattgttttcgaatgtttacatacgtttgtcttgtctccttacccgaattacaccctctatgcagtcagactgttggccaacctaaaatgtatcatataatctcttgaaatgaagcagtagctttcacatttgtcagtagtttatctttaatcaagaaatgtgatgatcatgtctttgcaaggggaaaaaaagacatccttagacactttgaaatgtataccctgctgacctggactttcctctctcacacactgcatgtgcctccctcaccacagaccttgtgctctcttgagaaggaagccagagaggcagcactatccctggaccagatgttcaggtgagcattagctgtagggacacagtgaattaaagaactgggagttatgacagaaaatccctactgtctgcagatcgagcctaacatcacagttatcttaaaagggacagccattgggagtcctggtcataagactgtgccttactgcccaaccttggttctaaactaacacaacaccatcatatacaagcagacagccagtgctactgtgataaagttatttatttattacatagacattgttctgccttcgtgccagaagagggcaccagattgaattgtagatggttgtgagccaccatgtggttgctgggaattgaacccaggacccctgtgctcttaacctctgagctagttctccagccccactgtgatggttaaattgtcaactgaacacaacctgagtcacccgggcagaaagcctggatggatgattatctacaccgggttagcctattggcatgcctgcggaggatgaatcactgtaactgatgtgggaagacccaccccataaatgtggacgccaccttgtagtagttagaagggcatggaagcaggaacacctttgcttttttgcttacttggcttcactgtcactggtgagttctctgctctgctgatgaagtgaaaacccacaaaagtcaatttaataatttattaagggtgcaatggaaaaacaaactcacaagtacagaacaaagtagacgctgccactgctgatcagctgctgtggtccagccgttctgcccgaggatgaagaggaccaaccgcgagcagcttctcctccctttgctccggctccgaccacccaagacagagagtgtactctcctcagttttatcgggtcacatattaatagaaagccatgcccatcgggctagtcacccccaacagaggaaccagtgtctttgggcttccagtgtggaatgaagagcagtaattgtctaggactcctcaaggcctttggcaccagattgggacgactgggacacccagtctcacagactgagccactaccaggtcctctctaatgtgggacagctgttgttgactactctgactggtaagccgatcagaatcctctttcattggatactcgcactatgttctgaccctgggcctccacgggaccctgactagtctagcacagtcaccacttacctacaagcaggcagcctcaacagtgcctccacacacaactgggtggagggctctgcatagtctgtgtaccagccccatagcagtgcaaggtgaggacctgaaaataaggattttgaataaacaaaacaaaagaaaaaaaacctcaagctgggtgttggtagctcatgcctttaatcccagcactggggaggcagagacaggtggatctctgtaagttcgaggccagcctggtctacagagtgagtgccaggatagactccaaagctacacagagaaaccctgtctccaaaaaccgaaaaaataaaaaataaaaaaataaaagcaccaagaaaggagagcattaatgaatgaggatcctcaccgaatgctcttggtctccgccttagtgtctctgctattgcggtgaggagacaccgtgaccaagggaactcccgtaaaagaaagcatttaactgggggcttgcttacagctgtagagctttagtccatgaccaccattgcaggaagcaggcaggcatagattacaaggggctaaatgctttttgtagagaggtactagctaatacagctggtacaactgttgtcctgagtattacattggagatagaagcaggatcaaaccctaaagaaacactttgaaagaaagaatattggatctaaaaattgatagaaagggctggagagatggcttagccattaagagcagttgttcttgtacaggatgggggttccattcccaacacccacacggaggctcacaaccatcagtaactccatttccaaaggatctcatgccctcttctggacactgcagacactttaccaatgtggtgcacagacacacatgcagcccaaacacccataaacatgagaataaatccttagaaacatatttgtgtgtgtgcttatctgtacatgtgcacaggctacagtgcacgtgtggagattgcagcacaaattctaattgtccttaataataaaaacttagagtcagatattggggttaaagctgaagatcagagaatcaaagtggccaacactagagagttctcacctccaccaatgctcagaccaaaggggcgatcctgtcctcagactgtgtcttcagactgcttagattgcactgttcctcagactgcactgatcaatcctcagactgtctagactgctcagacggccctatgctcctgtctcctcccgccttgtattcctctctccacctccttagtgcagggattaaaggtgtgtcaccaagtgctgggatcaccttgtgtgagccaccaccacttgactctgtttctcttttagactgggtccatttcatgtagcccagggtagccttagtgcagggattaaaggtgtgtaccaccactgcctggcctctatggctaactactgtggctagctttgcactctgctattcaggcaaaacacatttatttaccctctgagccatctcaccagctgtcttagttattgttttctgttgtgctggatggtcaacggaggaggatcatttgagaatgtaatttaggctcttcagcagcagagagggccagcctctggtgtactgaaccttgaacagctgtttagaattgtatctgttcattattacacatagtttgttttatgggtaaaacatgtccttcataccaaagcccctttgatatgtatgttctccacaactttagtccttactgtgtactgtttgcagcaagaaaccccaggtgtgccagattagtcttgtgactaaagtcatgcatcagatggagaacccctttagaaaaacagctctataaatcataggaaacaatcattgttctgtactatgatttccccaaggtctaagtacctccaacaaacaactactacattctagtgttaccctagatgcagtgagaaacaactacttgtttctaatgttacccagacacagggactctactggattcccactacaagttagtgtttctattggtgtgatgagacaccatgaccaaggcaactttacaaaagaaagcatttaatcggggcttgctgatgggttcagggagcatggcggcacaagagcagacgtggtactggctaagtatcttagaattcagcattctgatccacaggcagcaaggaaagatgagctggagagggctggacctggctataggcttttgaaacctcaaagcccacccccagtgacacacttcttccaacaaggccatgccttctaattctttcaaacagtcccactctctggtgactaagcattcaaacatatgagcctatgaggaccgttcttattcaaacctccacaccagcccttcactaaaatctctctctctcctctactctcctctctctctctctctctctctctctctctctctctctctctctctctctctctcacacacacacacacacacacacacacacacacacacactttctctcctctctcttttcagacaaggtctctctgtgtggtcctggatgtcctggaactctatataaaaactaggctggcctcaaactcaaagatcctcttgcctctgcctcctgactgctggaattcaaggcctgtgccccgtgactggctttccactaaactatctctttttaaaatttcttttgaatttaaattctattttatgtgtatgggtgctttgcttgcatgtatgtctgtgtaacacttacatgcctggtgccggctgaggtcagaggaggtggttggattccctggaactggagttacaccatatagatgctaaaaaatgaacctgaaacaagtgttcttaactgctgagccaactctgtagccctctgctaaacacttatttaaacaaagcagaaacagttctggcacacattacacttggcaatatatcattggagtccattctccctggactgggaagtttaagcagtcataagaattttaccttttaaagccactgacaatttcatatatattatatatcattaaaagcagggaaacactgttttactcatgatttttcatttagttatgaaagcagaagactataagataaaattctttttttttttttttttttttggtnnnnnnnnnnnnnnnnnnnnnnnnnnnnnnnnnnnnnnnnnnnnnnnnnnnnnnnnnnnnnnnnnnnnnnnnnnnnnnnnnnnnnnnnnnnnnnnnnnnngtcatcatcctcctcctcctcctcatcatcctcctcctcatcatcatcatcatcctcctcctcatcatcatcatcatcatcctcatcatcctcatcatcgtcatcatcctcctcctcatcatcatcgtcatcatcctcatacctaaacacatcatatcccaactctagaatgtatggttatctgacattgtatgtcagagggactttgctggtgtgacatttaaagattttgaataagtgagactatcttggcttaccaggatgagtcctaggtcatcacaagttccatataagaaaagaggacgcaagtgttggatgttggggtactgtgcatcaagaagccaaggtgtgtgtgtgtgtgtgtgtgtgtgtgtgtgtgtgtttctaggacctctgctctttctacacccctttccccagtggtaccttctgatctgagcctttattttcctgttctttgttccaggcaccaagttgctacttttggctttgataaaatgctctcctccccctcctgtctttagccacaggtcagagggccttgcctcctcagtagaagccagggtgtaatcagaaagccagtgggaagctttgacaagaagtcacctttgggcaagcttcacaaacaaggctgatgagatctggggaaagcagcctgcagtagagaaagcctgcaggagagaaaccctgcagaaagaggcgacagtgggggtcccctaggacccgtgagtgggatgggaaactgcaggacaccactcctccagagctgtgtgtgcagaactagcccaggcagaggcctattgatgctggcttttgacgggactggttccagccctctcttttgaacacttcaaacccatgaaagcctgagtctcttatataaaatggaatgatgtttgctttaaaactgtgctcatcctcttacatactttaaatcctctctagccatttgtgacaatgtagatattatacagttctcctgtattgcttagggaatgttcaggacagatgcaggtgacactttgtttgctgtttgtttgtttacattttggttgttgagtcagggtcttgtagtgcagctttagttggcctggaacttgctatgtagactaggctggcctctaactaaaggtgatcctcttgcctcagccctcctaagtgccagacttacaggagtatgtcaccatgtccatctcagacacaaactgttgttgtttgagacggggtctctatgtaatcctgctatcctagaacttgctgtgtatatcaggctggccttgaactcagagattttcctgcctctgcttcctgagtgctgggattaaaggtgtatgccaccataccctgtctcagacacaatctttaaaaatattctgttttttttttgttttatattttgcttttgtttgtttttgagatagggtctcatatagcccatactggtctccaactccctatgtaagcagaggatggtggccttgaactcctaatcatcctgcctctccctcctaagctctgggagtataggcattaaccaacataccacgctttctttgagacagggcctcactatgtagctcaggctgaccaggaactcactgtgttgatcgtgctgacctctctgccgcctgtgtgctgggattacaggcatttgccataaaacctgggcttagttaaacccaggaatgtagaaccctcagcaatagaggaccaattacatttggacagaaacctctgtgtgtaaaaagagaaagtggtcggagtactgctgctggggaaaacccaggattggcctatagtcagggcaatggatgatgctgggctggatgggaatataaactttcctgaagtttctggaaggctattagtagggattaccaatccttcaggatatgtatcatagtgcagcagctgccaagacgctcattgcagcattgtttactatgggaactgctcaacgatgaggggagttaaatacatggtgtatgactgtataggtcaccctcccccactctgttttatttttttaatatttattattatggatacagatctcattatacatagttgtgagccaccatgtgattgctaggaattgaactcaggacctctggaagagcagctagtgctcttaagctctgagccatctctccagcctcccaactctgttttaaaaaccaatactgtggaaggaggtgtgagccgatgttaaaacagactctggggaaaagagcaggtagctagcatgaagcagcaagagtgtgagatcacagttttaaaggttttactttgttttgtagttatttaactatttatttttatgtgtgtctgtgtactgggggtgaaggggccttcagaagcccaaagagggtgtaagctcccctggtgctggagttacgggtggttgtgagttagcccacctcaggtcacctgcatgagcaatataccttcttaaccactaaaccatcttttcagtaccgaggttccatttttaagaaaaacaatagatgtgaaaaagtccaaaaagacatacaataaaatgcctctgatgactgtctccagctgatggttttggaggaagcttcaatgtttttcctttgaaatattttcaaatattttccagcttataactaacatgataaatgcaaatatctgtaaaaataattaaaaggaagtgaacactagtgatacccgctttgtacctagatctttctattcgtcatcttgcttcttctctgaagagccctgtggggaggtggtactaggctcatttactatgtggggatggacatggacaccaaataactcacccatgatcacacggttcctccaggccagagacagtcattcccagctacgtccagccccttgtgtcccaaagaattccccagattctctgggatttgttctaggtaactttttagggggaagggggaaggtggaaggtggggagtggaagtagtttgaggaagtcttgctttatagccctggatgttcttgaactgaatatgtagtccagaccagcctagaactcacagcaatcctcctgcctcagcctccccagtgtaggattgcaggtgtaaatcggcagcctgcatattccgtatccctaatttgccttcctattgggagaagggacaaaactaggacagtaatggttctgcccctaaacttgagcactggtcttggaaatcagcacatctatttcctgtctcattgttcccattcttgttgataaatcataataaactgattagggataggggagctgaggggagctggtaccctggcataggaccaggcctggagccaaactcacagactctggctgcctatcctggctgctttcctcctccttctcctcctcctcttcctcttcctcttcttcctcttcttcttctccttcttcttttggtttttcgagacagggtttctctgtgtagctttggagcctatcctggcacttgctctggagaccaggctgtcctcgaactcacagagatcctcctgcccctgcctccccagtgctgggattaaaggcgtgtgccaccaatgcccgtccctggctgctttcttatgatcctccttcaccccaactcctagaaagcaggtcattggaaacaaagctttctcttctgtaaataccagtacctgggtgaccccccccccctagcatatgctaacctaggaccctgggataaatatctggttccattgtgaagcaaccaaaaagagagacacgccagcctagagttggtacccctaccagtttgtacagtgttcggcatagaaccatccagctcggaatgaactcatcccttgccacagaaaccacccaggtaacaagtcttgctcttaaccatgaggaacctgggagggactcatctttgcctacttgtgcaaatttgtcagaatacatgggcatgcacgtattacatatgtacacatgcatatacaatacatatacatgaatgtattatgggggtacttaggaataatatatattgatacacaatataaatatacattatgcatatacatgtatgtgtgttcacttatcctctgcattttaggttggattcctgtctccagcaacaagtaactgaaggatttaagaaaggggcttaaagacaagtgttagtggctcacgcctttaatcccagcactcaggaggcagaggcaggaggatctctgtgagttcgaggctagcctggtctacagagtgagcaccaggataggctccaaagctacacagagaaaccctgtctcgaaaaaccaaaaaagaaaaaaagaaaaagaaagaaaaagaaagaaaagaaaggggctaaaaggtggaaatgtgctccccgaaccaagatttcagactccaagtataaacctgtgccctggctactctgtccagtactcgacccagcagagtctccagggaccccaaaaggtgcaggtagagcacttgagcaaaaggacctagcttaagtgggagtatctgcttcagtacaaggaccccaaaaggcaaacgcacattgaagatcctgccttgattcattggacctatgcaagatcagcaaatatttatcctaatttcagacccactctaaaaagctcttttagtagctgtgatggcggcatttgccccccccccccccccccccgtcttctggtgttatgctttcaaaatagacagggaaggaaagacttatccagggaggaaaactggaacgaacattgaacctctcctattaagtttggcaaggaagactttattcttgcataaataaatcttctattaatcgctgaaaaaaatgaaaagaaaggggcttaagccccacccccagggcttagtttctcaattcatgaagcagaaagaggtgcaatgcctgacttgccacattgttgccaggatcaaattaaagtagggggtggatgtggtgatgtgcacctttatttatttatttatttattttttggtttttcaagacagggtttctctgtgtagctttggaggctgtcctggaactagctcttgtagaccaggctggtctcgaactcactgagatctgcctgcctctgcctcccgagtgctgggattaaaggcatgcgccaccaacgcccagcgatgtgcacctttaattccaatgctcaggaagcgaaggcaggcggatctctgtgagtttgagcttgagcttagtctacacagtgaattccaagacagccagggctacaaattgagatcctgtctcaaaagaagaagggaaggaaggaaggaaggaaggaaggaaggaaggaaggaaggaaggaaggaaggaaggaaggaagagtaggcttctagtagcaaccctttctttaggtcagaagttgcctaagtggtcagagaattgaacaaactgtcagtatttcctgaatccccaaactacattctcctatcacaaatgacccaaggaaaggtgccacaaagggatgatggtagactgcctgcaggagtccaacactccatacatccaataggttattgatcttgttgactgtctacataaggccacatctttgatgccacataaacaggagaagataatttttccgtgtgtgtgtgtgtgtgtgtgtgtgtgtgtgtgtgtgtgtgtgtgtgtacacatgtgcatgtatgtgtgtgtgtgtttctgagacagtctcccagtgtaaccgtgtctgacttgaaacccattggtcttctctctgcctcctgagtgctgtggggttataggtgtgtgccaccatgcccagcttaaagaaggaatctttaaagaaaacttatagtgaaatggaccttttccttcctgtatacaatcctatgcacttggacacacatatatacacacgtatactctaaccaggatacagaacagccataggacttataatttctagttggatactgtagtagtttgaatgtaattggcccccataagctcatagggagtgatcctattaggagatgtggccttgttggagtgggtttggtcttcttgaaagaagtgtgtcattgtagaggcaggctttgagggctcatatatattcaagccacacacagtgagactgagaccatttcctgttgccttctgatcaagatgtaggcagcactgtctgcccgcacactgccacgctccccgccatgatgatagtggactgaacctctgaaactatgagctgccacctcaaggaaatgttttccttgagttgctgtggtcatggtgtctcttcacagcaacacaacactgactaagacagatactagggaaactgaggagtttgagtgacgattcagggtcaagcaggttcatgttgatccagatgacagaggactgcatgttctgttatggagtgtgtgtgtgtgtgtgtgtgtgtgtgtgtgtgtgtgtgagagagagagagagagagagagagagagagagagagagatatgcatgtgtggggattcaaatgtagtgttgcatgtgtgtgtgtagtatgtgtgtgatgcgtgtggagtggaggtacatatgtgttatgtatgtgtgatgcatgtgtgtgtgtgtgggggtgcttgtgtatgagtgtgatcactctcggctgtttttaggatttggatggtttcattttgtctgtgagggtgtccttggctctggggcaaaaataccttaacctttagaattttaagagttctaagctggctgcagtgccacaaacctgtaatcccagtacttaggagggacaggcaggaggatcaaaaggagtttaatgtcatccacagctgaagagtgagttcaaggccagcctgggctacagaagaccctgtcttgagacaacaaaatgactcctagagactccagtgcagctggatggtcttagattctccatggccctatctacccaggggaattctccttcccagttgaacctcaactagcccatggcccccttgcctctcaggctccattggcagggtggttcttagcctctaggaagccctttctgagaaaatagaagataactggggtttccccaaaatacacacaatcctttggcatgtgtcttcccacacatgtcctgacacatgagctcaagatgagaggactcagtgagtaagcacccatggggaagccaagtcagtgactacctcttttacttcatggctggggttgccccaccagccttctgggacaaccagggtcccaccaggccccctgtggacatggttgtggaacggcactaaactggaagtttgtttcttggcacacatatgagattatagaagggctgaccagacctccagagccttccagaggccatcatcatcgcggtacttattactaagtggtaaaacaagagcactggagaacaggggacactgaatgggacaggaagtgattcaatcacaagcttttcttgcagtgtcactatcaagagtgacacagtctttggagaaagtcactatgcaaaaactgaagagcgggtgggtgggggaaacttggcagtgaaaccaggaaggagtccagcctccagctacgtgggcatctccaggaccttggggccttggggccagcctcagcctcagtcacagagaaaatacttccttaaagagcttttcactgctttccaaatcgcagaccttatagacagagagttactgtttggacaggtcactttactcctcaggcttctctgtttgtttgtttgttgtctgggccggaaaaatataaattatggtatttcagatataggctcaaactctatctcaggagcctggatctcccattgtctttcagatgctcggctaattaccaccggatgacttggcctttgtggagaatgtctcctagtttgcataacaacagacctaggccctgggtgcgcccacgcctattctgatggttttgtgcctagggactgtttaggtgtgccgctagggttaaaataattttttgatatcagctttatacatgatagtagatgtcttctgtggtcacctccactgttggaaagctatttaagaggatgctagaataaaccagagactccagactccagcatggactgagggccctcctgaaatgacaaggtatctgtgtcttgtctttatcaccgttgcgtagctaggagtttcccggcccagcactcccggggccatttgactggctccgatctcagccccaaagacatcagtctggaataaatagcctctgtagcatgggactgatacaagctggaccccagcagtttttttttaggggtaccaagtctgtagctactaatagggttgttgtgaaaaatcagataacacacatagacatgttcacgcaaacactatttaaggttggtggaagtagagcataatggcagttactgtgttaaaaacagagactctcagaagtggaagccttcgtctaaatcatctgtgttcaggtaaaaaacaatctgaaatactaaaggcttatggtgtctccaaatagagaaacagaagcacagatgtacccaagagcagcctctcggtctttctttccctactcccaccctcctctttctttgctgtaggtcggtcattacctaagtatgtgacatcagcaaattcccatacaagacttgcagagtggctctccttctctcagcttccatgccattcagatgcttcccttgctcatctcatcactcctgacgagagctgcctccagttgggcatggcagctcatcctctggtcccagctgctcaggaggctaaggtaggagttcagcctggacaacacgggaggaccatctcaaagacagcaagaccccccagttcctcgtctccagcctacctcctgggcagtcctctgagatgcagtttcctcccaggacgctgatcctccacacaaacaccacaccagctcagcccttcacacacagccctctctagcaagttcaacaacctgcaaccaataaacacttgagcaagaggacagtatccttctagcctgtaggaggatccttcaaatcataaccctctcaaaaattatgaagcctgcacagtctaaagccttagagactgttcttgacctagtgggctctgcactgcccttccacgatctgtaacactacttcctctcttggctcctgactccaacagcagcagcctcctgagctgccctgggaactggttttctcacatgactgcacttctgagcagctctcttctgttcccctgcagcactgtccccccagattaaagatcttacagtggagaatgggatgccccccgcccccagtggtaatgtggattgaacctaggccctgttggatgtgtgcaagcactttcccactgtgctatgtctccagcaagcttttgctttgttttcagacaggttctcactatacagccctggctgtccaggaacttgctatgtagaccaggctggcctcaaattcagatagatctgactacctctgcctccccagtgctgggatttaaggtatgcattaccacactgggattccagccctcttttttttttttttttttttnnnnnnnnnnnnnnnnnnnnnnnnnnnnnnnnnnnnnnnnnnnnnnnnnnnnnnnnnnnnnnnnnnnnnnnnnnnnnnnnnnnnnnnnnnnnnnnnnnnnttgaactagctcttagcccagacaggctttgaacttttcatctttgaacattagctttttaggcagctggaactgcaggcctgtgccaccaaacccagtttgggatttaatcactttttgttccaagatttgtttatttttgttctatgtgtgtaaatgttttgcttgcatgtatgatacatgtgtgcctagtgccacacaggccagaagagggcattgggtcacttggacctggagttacagacaattgttggcagccatgtgggtgctgagaatcaacctggctcctctgcaaggtcagcacatgctcttaactgatgagccaccgctccaggatttagtcaaaaaaaaaaaaacaaaaaaacaaaaaaaaaaaacaaaacttaaaccaatttttattttatgtatattgatattttgcctacatgtgccagatcccctgggactgatgatgtgaaccaccatgtcggtgctgggaacagaaccctggtcctctagaagagaaaccagtgctcgtaactgtggagctggtgagatgcctcagttgatactgtgtttggacacaagcatgacgatctgtgttctgtgcctagcacctgccgtggcactggcacctgtcaccttggtactggagaagtggggaaggaagaatccttgctggcttcctggccagccagtctagcagaatcagtgagttccaggaacagtaagagactctgtctcaaaaaataatgtggagggggctggagagatggctcagaggttaagagcactggctgctcttccagaggtcctgagttcaattcccagcaaccacacggtaatgtgatctggcgccctcttatggcctgcaggcagacatgccggaggaacactatagacataataaataaataaataaatctttaaaaaataataatgtggaaagtaattgaagaagacaccagttgtgttgcttgctctggcctccacgtgtacacacacaaacacactcacatgtgcctacacatacaaacacacacacacatgaacacacacacacacaactttcttttgaagttagatattacgaggcttgtctgccactccagtatctgggaagtggaggttcagaagctcaaagttatctccagctgcgtggacagtgtaaggctggcctgggttacacgagaccctatcccagttcgctttccattgctgtgataaataccaaaagcaactgggaaaaaaaaaaaaaaaagcaactaggacaggaaagtgtctctctcacagctggcagtgcagcatgaaaggaaggcagggcaggagctcagacagggcacctggaggctggaactgtgaagagaccggggagggtgctgcttcctggcttgccctccacggcttgctcagcctgcttttgcatacccaggggtggcaccagccacagtgggctggagcctcccacatcaatcactaatcaagaaaatgagcaacagacttgacgacaggccaatctgatgggcatattttctcagtcttctctgatgtctccagtttgtaccaagctcacaaaaactcgccagcaaagatcccctatttatttatttatttatttatttgagacagagtttttctgtattgctttggagcctgtcctgacgctcactctgtagaccaggctggacttgaactcacagagatctgcctgcctctgcctctgcctcccaagtgcaaggattaaaggcatgcaccactacattccagcctaaagactcccatcgtaaaagacaaaaacagggctgaagaggtgcctcaaaatttcagagagctggctgctctcccagatgaccagggtttgattctcaacactcacagggtggctcacactcatctataatgccagttccaggggttatgttctggcctccacaggctgtgcacagacatacatacagacaaaactcgcatacacaaaaaatcattttaaattatttttaaaattaaaaataaccaatataacttaaaaaaaaaaaagcaggccacaagttagttgtgtgtcacatacctgtaatcccaacacgtaagagactgagttagaagggccagtgttaccatctggctggcagcatgaacctgggagagcagggcctaaccgtgagcctaaccatggtctcatgcaatatccaactttattcagagcatcagatggtgcatattcagagggcattctgagggttaagcgaggtcatgagcagaggtcatgtgaattttggctgtagacagtcacaggccaacctgtgtttggagacgttttagaacaaaagtaagacgatggctaatctgaagcaaatccactcctatacctgggaggggctcgaaagcacattccaggagcaaatccacgaaggaacagaggttacaagactttagccttgtttacttggctttttctcacctgctctcagaatgacaggccaggagtttgatgcttgcctaggctgtatagcaagaccctgtctcaacaacaaaaatcaaaaccaggttgtagaactataggctatggtttgctagtttggtgtgtttatttgcttgtttatttgtttttataaagttttgcttgaaaacatcacttcccttgggccagctagacctatcagcaggtgaaggcacttggtaatcaggcctagggagcacagttcggcctctagaaccaacagaaacgtagaaggggagaatctggcttcacagagttgtcctctgacctccacaggtgtggtgtcacacacatatgccaccccaatacgtcacacaaactcacagtggtaatatatttttaaaataatgaagtactgtctaccttgattactgggggggggggaggagtttggtaccctccaaggagactttgtgcccaaagcaagtgcttcccatgctcctccttctccttggcgcactggtttgtattaccagagtccagcacagtccctagcagtgtgttagctctgtgttcatagtcacaagaatagacagaaaggagcccagcctgggaatgaggaactctccatccaggttctgccacttgttgtgtggtatcccatcactgctgccagcctccgtctgctagtgtgaaagaaatgcattggtctgttcttcctgcaaacactacaacacccattgatacagttgtgggtcgaacaaggagagatggacaccagttggctccttgccctggcagccgctcacggttgtatgtgtcctctgagattaaagcattccatcctccagaggagctccttaagcaaggaggtaaacaattaagaaatagcttcaggaagtccctgaaacagaccagattcacaaggcccctccctgagagagtaaagaaagcaggcagtccccctcagaggcctcagaggaagaaggcctgagcaccagagacaatgacatcagaccagactccctgcctagaagagatttggacaaactgcagcctgaatgagctgcctgtaggctttgcagtatgctctgggtttggtgggccttggtgatgtagtagtcttttagttatgtctgctcctgtaagtaaccccagtgaaactcactggtggtatctgtactttggtctctcatgggctctctacctggggtgagtagacaagtgtgcttcatttccccagaaaaaatgttgtcagacaacagtcacatttgagggaatttaggcatttctccctgactgtcttgggacactgttgtgatgtttgatgagaaaaggtaagtgtcatatactgtttaccagaagaccactccacactcaaagatggaactgttttcatatttcttataaagccgtcactagtatgagcactaactatgcatgggtgcagctcccttgctaggatcccaattttatggggcacttactagctatgtgttctctgaaagttactgaacttccgctgggtaggactgactgacagcaccagctgcatatggttgcaaggtggtagactgctatataatcataaatcagctttcacagagagctaccatagcattcctgccagctctggctgcgtttgtgttcactccctctctccatccctccatcattccagaaacactacttttaagtgatgcagaaagtggtccctgctgggagaagcttacacttgaattggtggcaaagccttgaagtttagctggggaagggagtttagcctggctgtgatacagtagaccatacccagggtggaccatgactgtaattttagcactaaggagcctgaagcaggagggttgtgagttcaaggttagcctgggctacacaggaaacctttacttaaaggggtgtggggcttaaaacgaagggagtaaagaggaattttgggaactggaggatagccaaatttaggtcgggggtgatttgtactacactgaaaacagctctttcaaaacttcagccagggaccatagagatggcccagcaggtgaacacgtgctcttgcagaggacctgggctccattccaggtatccacgtgatggctcacggtcacccataactccagttctagaggatctcaagtcctcttctgacttccaccaccactagcaacacaggtggggcacacacacacacacacacacacacacacacacactggcaaaacattccaacacattaaaaaaagacattgaaaaagcaacttccagtcactgtcctcatttggtcattcatttctcatagaatcctaaatagaacaatccattggtgggggtggggggtcttggtactctcctctataaaatgaggacagatggagagtatggcccctgagccctccacacatctccagctccaatggagctttggaatatgagaaaggatgaaaccacgcccccgcccccatcttccgtgacctctctcctggtgggtggtcaccaggacacctaccctttaggacaggttccagtaggttaggagggaactccttccgagcaccctcctgggagactgggggtggaatgctctactctgtgggcggctgaacactcccccaccccaccccaccccaccccaccccggcaaggctagggacatctggctgcctgcagcctggaacctcagagcgcgtggcacaaccactgggcggggaatgcagccagggcagttcccaccggctccctgctcagggtgggaccccttgcttggcgggggccactggaatgacacctggccaaatattaattactgttgcttccgaggtcccaccagtcacagcggtggcgagccctgcccaggaagtccaaataatcggcatcgctggtattttagtcaccccaatgggaggctgggtcatctgactccacagctgctccgaggcagtctcaggcagggccacttcccggaacccagtctgccgccgagaaagcagggggcctaggcaggtcggggtgggtgggggtcggggaggaggaggaggaggaggaggaggaggaggagnnnnnnnnnnnnnnnnnnnnnnnnnnnnnnnnnnnnnnnnnnnnnnnnnnnnnnnnnnnnnnnnnnnnnnnnnnnnnnnnnnnnnnnnnnnnnnnnnnnnttttttgtcatcttggagccaagacctgaaagccatcacacatacttttaaagaagggagtcacataggtaaatcattatgtctttcactctacacagagtataagaatggcattgtttaaaggtaatgataagttaaggggtatattgtaaatcttggctaaactattaaaacaaaagaatataacctggctaggtagggtggtgtaggtcctaatctcagcacttgtgagttcaagaccagcctgatctgcatagagaggtcagatcggcctgtagcataaagtggaaaaaatatgaaatcatgtaaaaatactaaattcatccaaaagaagataagtacaaataagggataaatagaagaaaaacagcaaatggtagcttgaagtcatgttgattgttttataaaagctaatttaaagcataggagttctaaagagaaacacaaagtcttactgtttgctacttacaaacaactctgggggcctggatcaatctcagtataagaccctttgcctggcgtgcatgaggacctaggttcactttctgtaaaacaacagcagtgagcaggaacaacaaaaaccctctaaatataaatacacaaattgaaacaaaggggctgagctgggcacgatggcacatgccgttaatcccagcactctgaaaggaggcaaggaaaaatgagttctaggccaacctagtctacatagcaagttccagcacagccagacctacacagagagaccctatctcaaaaccaaacaaacatcccccccaaataaaccaaaggaaaagtaaaggggctagggagatggcccagcaatgagagagcatagctgtccttcagaagaagggggttcagttcccagcacccacattgtcttccttagggtctttttttttttttttttttttttggtttttcgagacagggtttctctgtgtagctttggaggctgtcctggcactcgctctggagaccaggctggcctcgaactcacagagatccacctgcctctgcctcccgagtgctgggattaaaggcgtgcgccaccaactcccagcttccttagggtttctattgctatgaagagacaccatgaccatggcaactcttgtaaggaaagcatttaattgaggtggcttgataacagtttcagagcttcagtacgttgtaccatggcagggagcatggcagcacgcaggcagatgcggtgctgggggaggagctgagagttctacatcttgagggccacaggaagtgaactgagacactgagtggtaccccgaggaaaggaaacctcaaagcccgcccccacagtgatgcacttcctcccacaaggccacacctcttccccaccccggacccctgagacagggtttctctgtgtagctttgtagaccaggttggccttgaactcacagagatccacctgcctctgcctcccgagtgctgggattaaaggtgtgtgccaccaaagcccagctaaggtcacacctcttaatagtgcaactccctgtgagattatgggggccaattacattcaaattaccacactcggaggctaacaattatctattactccagttccagggtatctgactctctttcggcttctgcaggcactgcatgcaagtgatggacatacatacatacatacacacatacatacacacacacacacacacacacannnnnnnnnnnnnnnnnnnnnnnnnnnnnnnnnnnnnnnnnnnnnnnnnnnnnnnnnnnnnnnnnnnnnnnnnnnnnnnnnnnnnnnnnnnnnnnnnnnnaggaggaggaggaggatgatgatgatgatgaggaggaggaggatgatgatgatgatgaggaggaggataatgaggatgaggaggaggaggaggaggatgaggatgaggaggatgacaatgatgaggatgaggatgaggaggatgacaatgatgaggaggaggatgaggatgaggaggaggaggaggaggaggaggaggaggaggaggatgacaatgtgcattggtgttgtgtccgtgtgagggtgtcagatcccctggaactgcagttacagacagttgtgagttgtgcacccacccatgtgggtgctgggaattaaacccgggtcctctagaagggcagccggtgctcgtaaccagaaagccacctctccagccctgcgttcgggtattattattctaccctcctagcttggcaaactacttttcctctctgacttgagtttctttacctgcaagctaagagtcttcaacacaaagttctccacagtgtctcctggacgtggctgttgggaatattttgagtgagatggggcaagccaaggaccagaaccatgctcctctgcttgaaagtcactttcctgtctgattgctcgagtttttattaattaaacaagcatgcacagtgcctaagtcctttaccaaagcaaaatcatttagtattcatggcagctcatgagtggagtgttatggtcactattgtgtgggacacaggatgagtaaggattatacaagatgacaaaccagcagggctcacggcaatctcagctgtctggctccgtgtctatacatatgtgttcatgatgcaagctcatgcatgcatatttttgtgggtgtgtgtgcacctgcttgggagtctctgtctctccctctgtgtggtgtgtgtgtgtgtgtgtgtgtgtgtgtgtgtgtgtgtgtgtgtggagagagagagagagagagagagagagagagagagagaattcttgggggtcaacttgggtcttcatgtttgcatggcaattactttattgattgactctctcttcagtcctagagtctagacttttaagagctgactagctaggttgttctcaaagcccttggctcacagtcctgtggccatgacctatctcttgtttttggagaagtggggcctcatgcactgcagggtgacatcatattctacaaacagcagaggatgaccttgaacttacaacccttctgcctctacctcccaaatgctggagttgtaggcaggtgccaccatggcctgttgtttggcagtgctgggaacagagcccatgctaagctagggctttaacaagttgaaaagcagcctcagccactatctctcttctgggctgaaagtcttgttgaacatgtgaactccagctgtgataagggcctagcacacaggtgaaaacacggagcaactgataaatgattatcagcattgctactcctctagagtctccttgaccaaagctatgtctgcaagacaaaacaacagatgtttaagccaggcacagtggggtgtgctcagaatcccagcattctggagcatgaggctggaagacgctgtgagctccacaatagtcaggactacctagcaagaccctgtctcaaaaacccaaggggaagggaacacttaccagatattttcaaaaagagcacaggcttcacactagctcttggaggtggttactgaaattcccaccttttacagaccagcaaactgcagtaggcttgcccattgtcgggatctgcctagcctgcatccaaggcaggtcagccagcgatcactggggcctgcattttcaagttaggacctcgtttactctggggggtggggtaggcagggaaaggaatgaaacaaagaaacattttaaggtcaactgttctatactagactttgatgccaggagtttaacatatctcctttagtcctggcaacaaccttgctacatttcacagattagaagaaattcctgaagacgtgggtagagccaacatttaaaactaggtctgtctaactttgctgttgattgactttctaagctgggcctcagctctcccagctgaagaatgaagaatgggctccagctcagcttatgttttcaagtgaatgttaactgcttgtcagatagtgtgaatttacatcttcatattaccctctggggtgctactcccatttctactttacaaatagggaagctgaggttcaaaaatcacaaaatttgcagggtccaaaatcacacagctgcttttttggctttttgttagttcttaaatcaaatccttgctcatgactccacacaggttctggggtgtccaacagctttggaggaaggccttcctgaacacctgctgaattggaacaaggccagggtggccagaggatgggttctcaatgtgcgggcctcttcttttggatttcaaaggttcactccagtgaagttctgatagagtcaaaaggtgacactgaggctcagagctggccctggcaccacagggcttgatcattttctctgatcttgttgtcaaggtaaccttaggactctgtggttccgaagttactcttccttgcgatggccattcccagtggcccactggtgagtgcttgcagacggtatgagagatacaacagttgctaggactttcaggctgtcaatcagagaggtgtctggtaagcatttgtccacttcactgtcgccctgcaatgacttgcaaaatgagcgggagctcaggaaatgttgaatgcatgctcgcaaaagggacaagtaatgggaagcaggctgctgcattttcctaggccgagtaacaggctaaggcttgtagtgatggacaggtgaggttgctatgggtgaagatgctcccaccatcccgacaacctgggaggaagagagctgggctaattcttgaaggtgacctccacatgtgggctgtgacacacatgttccccccacacacactctcactcactcacacacacacacacacacacacagagagagagagagagagagagagagagagaaagagagagagagagagagaaatcaagcatagttttttgagacaggggtctcactatgtcacaatgtctggcaaggacctcactatgtacatgaggctagtcttgccttggtggaaagagaacagaactctccatcctgtatatgagctgtctgtcttctgatctccacgtgcgtgccatggcacatgtgttgtgcctacatgcattaataaaatgtaataaatgagtgtgtgtgtgtgttacacaagctcatgcctattggtatatagaaagtaaaagctttgagatgctgacctctgccctgttggctcatctccacacctgtgagttacagctgcccatggaagagtctacctactccaggctccgggaatggggcaacaagtatgtcacttgtccattctctccctctcttgttataatctagaaaaaacacaaaacttactgtactattttaaatgcacactcaatgtttacatttctattgctgtgcaaccaacatctaggtctctctcattgcacaagctgtctcgttcaccttgtacccatggtattttccaaagccatcttggattttagccacaagtacgtagtcactgggtttaaagtcttcagtgagcttttaatattcattcactcttttatttatttgtggggtggggaaaggcacatgggacacgtgtgtgtgaaggtcagatgagtctggcaggaatgggggcttttcttgcaccaactgtccacgtgggttctagggataagctcaggtcatcaggcttggtggcaagagccttttattcactggtccatcttaccagccgcaaagcctttattgagtgtttttatggcacaagatggcatgagtgttcaggaaatggtcgttgacgtttgtgtctccacccgcttcagggtttaggggcaccttagcagttgaaatgcctcacagttagcataagagtgccctctagtggaaatgatgaaaattgacactgagaacaacccattggcctttctagcaggtatcaagtatctagcaagtatcaatttgtgtcctttgtgtggtttccttactggactccgcggagtctcaagttgtgatcagttgaaagttgaagtgtaatggttctgtaatcttagaactgaaagaatccaactcaaactcatcctaatacccaccagcatgtatttgaaaatcactctggccacacacagctctgagaaaaagaacacataaaatggtccgtcatgatgaccagtctctggaaattgttattattactagtttccaaggaatgttattatcctcaacatctgtcttgtttctgaaaattgttatgggttactctgatccagagagtcattcccacccaagttttgaaaataagtataagtcactctgttcccagaaaaaccactagctgtcccatggccttgcagctgtaaaaaccaaaataacattccaaacccctcgtgggcaaaattgtaagttcagttcccaaacaatcagtaaatgactcatgtatgttataaccaatcaatatgttgtcacactcctgcctagtgaccaaaaagatataaaaactgcctgctttagaaactcggggtcgatctcttctcagagaaagaccccaacgcgttggaataaaatccttttgcttttgcatcaacttgcgtcctgtgagtgactctgtggggtacgtctcctgaagttggtcccccttttggacccaacagaacttgggttgtggaggcaggaggactgctgttgtaagaccctcagaaagctgaggcttccagaatcttagcccaggacggcggccaccccaaacacagaatggaggcgaaagcttgatgcaaactgcatgaggctttattgtaatttaacgagctaaccccatgttagctcgggtcttccacccacccgccatggcggacagctagaaaagacggctccttgggtctcccaaaagatcttatagggcagcgtaaggggagtgtctaggggtacgcacaggcttacgcacaggctcacgattggtgtgcttccaggcttggagggcttgccctgtgttgattggtcaactggttgttatggcccataggccctcccaggnnnnnnnnnnnnnnnnnnnnnnnnnnnnnnnnnnnnnnnnnnnnnnnnnnnnnnnnnnnnnnnnnnnnnnnnnnnnnnnnnnnnnnnnnnnnnnnnnnnnaggttgagaaatctaaggaaattgcccgaagtctcaacctggcaagagacaaggctgggacactttccactaatggcaggtaatttcacaggccggaaaaaccactccggcctaatcagtggttgagtgtattgagaacgtgagaaagcagtgggcagactaatcaagatgacactgggccatggacacgccttcttttggtggcatcacaaggacccctgtaagaggaagagagggaggggggcacttgcattcccctcctacccactctgaattgtgggaattgaagcaaacaagctccccaaaatcccctagagataaagttcattagccgaggtcaaatgtcaagtatcagtatttcaaacactaattcctgagtctgaaatcgttttttgttaaaggatgctctaatttaatcacacatccctctccaggatccacccccaccccccaatccagctgttacagaagtgcaaatactacaaggtggggcacccagccatgtgcacagaccatcacaactgttcaaaggcttgggtaatggattaaggaggacagactgagcgaggaagaggaaatccaatgcacagaaaccaggctggctggaaacatccagtgttgacagagttttcggcaatcgcagggtgattttgtgtttctcttgttatctaattagactgaaaaactatatgtatttcaccttacaaagaagacagtggatagtgatggcaataagagtagccacatgtcctttgccggcatttactgaccatcaggcagtgcggaaaagctctttgcttatgttttcttttaaccctccctgcgccactgatccaaagccctctgcctaccaggcaggttttcccttgtacccagctcctcctacccaaggccaagggctgatcagctgcctacaagcctagtgcagcaggcctgggtgcagaccacagtcaatccagccagattttccaacccaatgcctggctcctggcccctgagggccctagctgccgaggccttcaccttgctatctggctgtagtgacagaccgtcctgagcactcttcatgagacatggcagttttaggcccttgctgctctgggcctttggatgttttaatttattgcttacttttcaagactggcatgtttcagatcctaccaatactatgcagaggaccgtcttgtgtaagattgccaggctgtgtttctatggcttgtcagcgtaagtctgatccctgtcaactactttccagtattccagagcagggctccaatcagacacacttaccatgccctatgcgtatgagcctcctgtgcctcccactcctgtgctaagtgtggtggaaacttcctgagtttctagaaaataaaccaaaattgtttccttgaaaacattttcagaagctgagagcctgccacccactctattgccctgggaacagggaaagccatgttgtgaagggcaagaggctggggtaaacccagaaatcggggagggtgcaggggtgggtcagcctccctggcacttccaaacaggcaccaggggcctgactcaatctaggcctcctccccactttccttgacctttggagtctgagagagaaagccctggtgggttaggccccatggtcccttccatgttcctctcctatgctgacgggacagcttgtctacatggccacctccatgcaactgttagtgtctacaggacaaagtctgcgcctttctcaccctggatccctgatagctggcagagaatgctattagcgtgagtgggaaggtaaatgacaagggctctccccatctccaaccgagcatcgtgccaccactcaatctggattttctaacaagtcttggttaagttgcacagccatggcctttagcactgataaacggtgcttgcaactctggcttttaacccacaagcagactcctccttaacctcccctgtgcctcattttcctcttctggagagtggtctagaaaagacaggaagaacctgcgcctggtgggcccccaggccagcctggtgtgcttcctcctcccagcgctcattctgactcagtcgctgtttcctgttcctcacctgagtaaaagtccagaaatgaggaaaaggttaagtacactagagcctaccagcaagacaaaaaaatattagtggctgataaaaggcttggccgatgattttttttttaatgcatagaaaatgcatattcacatgaggtggaaaggagctaaattatacatgtgttatgctgtgcatgtttatgcttgtatatggaagacagcttctggaaaggtagaatttgactttcactttatagctttctattctttttttatttgggtgtgcaggtataattgtgcttaatggtatgtgtgtgtgtgtgtgtgtgtacatatacatgtctttgctttactataagtgggttcgagcacacatgtctgtgtttttacatgtgtgcatacatatgtttatgtgtagcatatgcatgtgtacatgtttgtgtgtgtgcatgtgtttgtgcatgtttatgtggagtccactttgggcgtcttctattattctctaccttattgtttttatttatttttatgtgtatgagtattttccctgaatgcacatacgtgcaccgtttgcttgcctggtgtctacaaaagtcagaagaggacatcagatcccctaggaccagagtcacagacagttaggatctgcatgtgtgtgctgggaatcaaactggttctctggaagtgttcttaactgctgagccatccctttagttccccacaccttattttttgagacacagtttctcactgaacctggagctccttgagttcgataaggccagcaatcagtctccaaggatctgctcctgcctcctcagtgctcagactacaagatgccaccatgcttggtgagagctggggatccaaactcaactcctcaccattaaaacagcaaaagctttgctaatggagccagctctgcaactccactttgagtatatgctagtatttcctcaaatacagtgtgcacactgtaatcctggcattccataggatctgtgagtttgaggccagcctggtctacacagtgagttccttccaggataaccagagctacctagagagacctgtctcaaacaaaacaaaaagacaaaaaaaaaaaaaaaaaatagcaacagcaacaaatagacaaaaataaagtaacaagatctcagttgctgtgcccttggcagtaggggaattattgaaatattgtttgtatttgttctgcctctcaagtgctgggatcaaaggtgagcaccaccatgcccagccaaatattctttagtatttcctgagctttacacaactagtttatatttcctctataatgtgcttaaagataaaaaccatttcaagcatcttctcccctccagggtggggggtaggcaagtgactgcgcacagtgtggatgcaaagggtaggacagggcagaggctgtcctggagccgaggtttctgctgagccatataacattgtttagcctcagctggccagtagaggcaagaaataggatgtctaagtcatccttagtcaccctctgggggagcagggcagggagcaggggcaggaagttacttggaaggagcctcattctggccctgaagccttctagactgaggagtctaagacctaggcccctacccatgtggcattgttcccttggggctgccagcctactgcgggagagtagaagggttaggaaagaacacaggaaaatgccctctggccattggctggtaccatcctcctgaggaagctgttgtgaaaattaattaccatttgtctgggacttttagattcctcagatgaaagacccagtggaaggaggctcatgatgagtacgtgtttaccgtactgactttcatcctaaatttccaacgtgacaatcacgcacccctcccctagcctcccactgcctggacatcttgccccaaagtgtcaaaggtcaagcttcagaattgaatcagcaccaaagagggggaggagagaagggaagaggaaggggaggagggagaagaagggagggaaggaccagagacaggtgacagacatcctgtgtttcagatagctaaacccaggggctcctctcccaggttaaaggggggtgggggggtggctgcagcaagtctaaggagctgaggcttgcagaaagtggttatggatattccgagctagtccttgttcctgccagcctagaaccctgaactttaagtctttttagaattgaggagtgggaagaattctagaaggtgctaggcagcttgcaccctgcatggagtccactgcagtgccttttcctccatcaaacagcaccgactctttgttgatggcttctgaatattgagaagacagggtcctgttgctcctactcctggagaactctggttttcccgagtcttcttttgccttttcatcttcatttcatacaagatgacagatgagctcaaaagccatgtgaagtttttctagccaggtagacagaatggatccagtgtgtgtgtgtgtgtgggggggtctttggcttatttattaatttagacaagggctcattgtccagctcttgttcttgcaccacactggctttgatgtcacatagctctgcctcctccctagtactgagattaaaggtgttcaacactatgcctggttgctttaaaattttgttttttgaagacaagttctcatgaagcccccagactctacttgaacttaataggtaactgaccaactggccttgagttcctgaccttgtttccacctccacaaacggggattacaggtgtgtaccaccaaaccagctttttatacacttatttttttttaattaaatttttcatttccttctctctctttttttaagacaaggtcttgatttatagaccaggctgacctaaactttcaatcctcctgtctctctaggtgctagaattataggcataattgccatacctagtagagagggccttgaaggctccagcccctcccccaagaagactgaattcaccacctaagggagcagtcaggccaaggatggcctgtgctctgaactggagaagtcaggaaactgtcccaggctccaggtgtggaggcctcatgaacagagcctgtcacggtcagcagggcaggttcctgagacgatggggtgggcaaacaggcagtgggacaagactatggaggccctgaagtgccaagttaaaggtctaggatggcccagaagactccagaggcctcctgcaaagtctctgagcagagggcatatgatgcaagtggaggggaaggtgagatattccaggagaagaatctcaaaccatcccgactctattttagctgacgacacatcagcaccgatgtcacctcccccgtgctctctgacacactagccagctttttcatggcacttaacgcctcagcaacgatcctttatacacttgcttacttcctttgtttccgtgtcccacagaacataaacaaaacagagtaggtggtgggggggtcattatcttgttttgttcactgttgcctctccagcggctgtgacaagctaatggcagatgctgcgagtgtatttgtggaatgaatagatagattgataaatggaatgatggcatcactatttctgtccccaggccccaagccccatggtgatgcttgactcatactcctgtgtggaaatctggcggtctctttgtctagatgtgttgtttctgttttcctcccagcccttcccctgtgcacgcagctctaccctccccaacaactacaagctccttgggcagacttggccatgacaattcccactgatccaatccctatgatgaatgaatgaatgaatgaatgaatgaatgcaggccaacaagattgttcggaagggctgctgaggttcatgttggtcttcactgaccgcaaaagacagaaaaacctggggaggcaagtgaatggaggtgagggaaatgaggatggctgggagcccaggctgagtccccaggggttagattgctttttccatgtgccatgttctgtgttcactctgccattgtcctgttattcctgacagaaaaggccccctgcaagaaattatcaggacaaagttgaaggggcaccaagattttggatccagtggtgactatttgttggtttatgtgagtttactatttctaagaaaataactagttcccctggcaaaaattattatacaaaggacaaaaaaatacataaattaaaaaaaaataaaagaaagctgggtatgatggtatactttaatcccagccacacaggaggctgcggttcgtgggtcatttcagctcccaagttcaaaatcaaccttggcagtttggagagatggcccagccattaggagcatgttctaattctgctgagaacctggcagccattcccagaatccaccaggtttaccaccacctataatgctgcatctgaagcctctggcctctaaggacaccagcactcaggggaacatacccataccagataataaaataagataaaaactttaagttcaaccttggcgtgataataaactatttcaaacaaatatccacagaagacctgggtctggtgccacagatttatttataatcccagcccctgggcagagggcagagggcagaggccagagggcagaggcagaggggcagaggataacaagttcaaaaccttaggctatcagctgctgagtgaattcaaagccagcctgggtaacttagtgagaccttgtctcacaaacaaacacagactagaaaacatatctcagtgatagagtgcttaccctgtaagcatgaggctctaggatcaatccctggtacttggggtagagatgggggtgtggagaggaatacacagttatttcaccattcacataaaagagtttagctcagttggtagagcatttgcccagcatgcactaagtcctgggttcaggccccagcactgcctaaagcaagtgagactgagactatgttcatctgtaatccaagtgcccggaggtggaggcaagttgatcaagagttcagggttgtccttggctacacagcaagttcggggccgccaatctgggctatacggggggaatcgagagtggctggaaggctgaggctgtctccccagggaccagactgctctgcccatgtaccatgtgctccttaatgagacttctcaaagagaaagaaaaagctattttaatgttttaatattaacatgtagaacctttcagattatatgaacataaacacaaatacttatgtttataaactgtattcaactgaaaatacttaatatattctatacactttatatatatatatataaaatctaaattaaaaatatttacacaattatacatatacattgttgttagataggattcatcatttggcggtttgaataaaaatggcccccataggctcatagggagtggcacaattaggaggtgtggctttgctagagaagtgtgtcactagcgggtgggctttgaggtctcagaagctcaagccagttctctgccgctgcctgcagatgctgcctctccagcatggagtctgtctgcatgcaccatgcttcccgcctgacgataatggactgaacctctgaactgtaagccagctccaattaaatgttttcctttaaatgagttgccttggtcatggtctcttcacagcaacagataccttaactaagacatagttttataacctgctttttgttcacttaatcatatgtgataaacacaaaggtgcttttataagcccaaagggcagtttgaaaagataacccttgggataaacaggaaggctgggctgacgtatgcgtgtgagtgagctctgtggttttgataaatattattaaagtaaataaatcttagctatgctgccagagtaggtactcattagctctgtgagcaaggccacaaaatgaagactcctggaacactggtgcttgaaggaaccattgaggtcatctagttcaatcccctttccttcctgctgagaagctacaagcccaggaccattaaataatatacctaaagagatgccacaggagtggtggcacaggcctacaacctgctgtcccagccactcaggagtctgtggtaggagagtcacaacatcagggcctgcctaggctacagagtgagttcgaggccagttggggcatttagtgagaccctgtctcaaaaagaagtaaagtgtgtgtgtgtgtggggggggcagctggggcttagtatagcaaaagaatatttgcctagcaagcatgaggctctggattcaacccttagcactaaaaaacgaagagaaggaggaaaagacaagataaaaaaaggcttgatgaattgatggctcagagcacacacaatgctcttctagaggtttcaagttcagctcccatcacccgtgtcaagaagctcacaactgcacctgttagacccccgaaaactgaagtatccggggtctcaggccaggttcgcggtcaccccaatcaccaggcggattcgagaacttgctgcaaactgcacgaggctttattgtaatttaacgagctaaccccatgttagctcgggtctttcaaccacccaccatggcggacagctagagaagacggctcctaaggtctccccaaagatcttatagggcagcgtaaggggagtgtctaggggtacgcacaggcttacgattggtgtgcctccaggcttggaggnnnnnnnnnnnnnnnnnnnnnnnnnnnnnnnnnnnnnnnnnnnnnnnnnnnnnnnnnnnnnnnnnnnnnnnnnnnnnnnnnnnnnnnnnnnnnnnnnnnnacacacacacacacacacacacacacacacacacacacacacacacacacacacacacacacacacacacacacatacacacatacatacacacacacatacacacatacacacatacacacatacatacacacacacatacacacatacatacacacacacatacacacatgcacacacatacatacatacacacatacatacacacacacatacacacatacatacacacacacatacacacatacacacatacacacatacatacacacacacatacacacatacatacacacacacatacacacatgcacacacatacatacatatacacatatatacacacacatacacacatacatacatacatacacacacacatacacacatatacacatatatacacacacatacacacatatacatacatataaacatacatacacacatatacacatacacaatgcatacatatatatacacacatacataatacatacatacatatacacatatatacacacacatacacacatacatacacacacacatgcacacacatacacacacacatacatacacacacatacacacatacattcataaacacacactatctatctattacaaaattaaaaaaaattaatcaagccaggcacagcagtacaggtctataacctcagcactctggattatcgtaaattcaaggccagcctcagctacataaatgagttcaagaccagtcagggctacatgcaatcgtatgttgctaaaattccttctcagagggagatataagtaacatctcctccccaggccccaactacacactggagtgcaattccacctgagttcaatctagagaatcagacgagtttattgcgctttcttccagagcataggtgaggcctcacctcctgggtgtgtctgctccctccaccgaaggctgcatcagaaagtcttcacccagctgtcagaggtggagctcctgcacccttgtcttcctagagtacatactctactcctcccccaggcacgagcacacacaggtcgtaggaagtgactggatgcactcacccggtaaagggctctgaacagtcaataaacccaattgggatgactttttgtaattgcattcggctgaatgccccaagactgcagttggtcggttcaaaggacagtcctgcacaacatcttgtctcaagaagataaaaaccacagcaactcttaagaacaaaggcaacctccaaaaagcccaaaactattccaatggcttcggtgaaatgaacaaattagttgaaaaacaccaatctactaatgctcactcagcaacaactaagtcactgggacggctctcctgctactgaagaaatgttatcgtgtctaacaaacctcataaacaatgtcaggcccaaatgactgcctggcaaattctaccagacatttaaagaagaaacaatagcaactgtgcaattgtttatagacgctggtctactagacctgtaaagaagaaacaatagccgggcgttggtggcgcacgcctttaatcccagcactcgggaggcagaggcaggtgcatctctgtgagttcgggaccagcctggtctacagagagagttccaggacagcctccaaagccacagagaaaccctgtctcaaaaaaacaaaacaaaaacaacaacaacaaaaagaagtagtaattactcaattgtttgtagaagctggacaaggaaacattctctctagttattttacttatttaaagattaaaattacatctatttggaatggagagcatgtgatatactcttccagagaacccaagtttgatttccagcatgagcacccagtggctcacaagcacctacctgtaactccagctccagggagactgaaacctccggcctctgtggacacctgctgtgttcactgcacacacatgcacacacatgcaaaacagtacaaataaattacgtttattttagtgtatgtggcaggctcatatgtaagtcagagaacaatttgcaggagtctgttctctccttccacccagtggggctggggatcaaactcaggcatcaggcttgggcagtaggtacctttacctgatgagccatctcaccaacccctccctaagaatttaatgagggaagcatcatttctgatactaaggcaagacaaatgcatctctagaaaagattacagattaatatccttcataactacaaaatctctaacaaaatattagcaaattgatgccagaaatgtgttttaaaaaatacaacacagtggagtttcccccagaaataagattcgatcaaaatttatttatttatttatttatttatttatttatttatttaattttagttttttcaaaacagggtttctctgtgtaactgctcttactgtcctgaaaattcactctgtaactaggctggccttgaattcacagatatccacctgcctctgcctcctgcgtgctgggattaaaggcatgtgccaccactgctttgccaagatttggccagtatttaaaaagcaatccacagctaggattgatgacataatcctttaatctgagcatcaccaagcaagacagacagatctctgtgaagtctgcatagtgtctatatagtgagttccagaccagccagggatacattgtgagactgtgcctaaaaacaacaacagcagcaacaataaaaccaatccattggccagacagtggcacacacatttaatctcagcacttggaaggcagaggcaggtggatctctgagttcaaggccagtctagtcatagggcatgttccaggacagctagggctacacagagaaaccctgtctcaaaaacaaaaacaataaaacaaaaagccaataaaaataccaataccaaaaccaaaaacccttttggacttagagaaatgaaataattagtccatctccacacagctggtaactgacagagacaaaactcaaataattactgctatctcattaatcagaacccatggtaccacaccactctttggtctcttaccagcctatgggtgggctgcttttgagtcctataggttggaaccaataggtttctttcagttcagagccctgtctacttggatccaaggagcaggcgctctcgataggtcaggtccagctagaagcggtgagcaacttgacttctatgatgttcaattaaatggctcatacttccatatctcataagaaaaccccccaaaaatgtccatataaaatctatccctaaactggcccctgtgttggctagctttgtatcaacacaacccagagttatctgaaagggtgtgtgtgtgtgggaacctcaattgacaaaacacttccattagatcctactgtaaggcatttttaaaattagtgattggtgggtgagggtccagcttgttgtgagtggggccacccatgggctggtgttcctgggttctataagaaagcaggctgagcaagctatgatgagcaagccagtaagcagcactcctccatagcctctgcattggttcctgccactaggttcctgccctgctgagtttctgtcctgacttttcagtgataggctacaaagtagctttgcgtcaaggtgtttcatcccagcaatagaaaccctaagagagccacaattggactactccacccttatcatctaataagtgccttctagataatatatttacattattttgatcccactctagagatcttggccaagtcaccaaggaagccagtctcatcaaggaattcttgggagagagacggcagacaaatgagttatttctgcactctgaaaccgcgatacctaacagaccttaagggaggaagatttactttgcttcgtgacttcagtgcatcaagacgggcatggtgcatcaacctagctcttgggaggaaatagggaggaccaggaagtagagaacaggacccccaggccatgcagccaagagtctgcccctagggatctatttcagacaattagacccaatctcctaaggccccacagtctcctgaaatatatccgctgtcttggggatatgcatttgaaacatgagcctgtcagcgggaacatttcaggttcaaacgacaaaaagcaacacacaggccacttaggtatgtattccataccttatgccataaacagtacatgtagactttaaatgaggttcaagggatttgtggttgctttaagtctctgagaaaatggaagtaaaagaaaaagaaatttgggattatttatggaaatgaggttgagtagttaaaaagaatacattctctatgctaggcatggtagtatgctccccaatctctgcactgggcatggtggtgtgctccacactcagaaaatccaggcaggtagactgagcctgaggccagtctgggctacatagcagatcctgtcacaaaactaaaataaaagactaaattgatagcaaagctgccatcagcttctgcaggtcaaaagtttagttctgaacttccacatagccctagcagacagacaggcagtcatgagtttccggatattcagaagataaatcaccagttcagagagataccgctgttctggcttttgaagttgggggtgacattttcttagggtctttgccttgggtgcacagggctcctgacactccctaagtacttgtgggaccctaccctccctcccgccaggcccagctcagacattagggtgaaccagaagggttcgtgcatacatgcagttgggaaattaacatcctattgtctcagactcaatgcatcttcacatgaaacagtggagacaataacgctagctgggattctccatctgctgctggacaccagtgtgaagttgatccaacacaggtgtgacaaccagggagatgagcaagtggagtgatagtcccagagcctttcccagctgtggggcttcacttggcctgccccatgcccaccatgactcacttatgagcaatcctcagatgcctgatttagaggacttactcaccctttagagacagactttaatgcaataaagcaaatgacatcgagtgggatgtggctgggcacagtagttcagcctgcagctggcttcccactccccagctctccctacaaggtcctccagccactcggcacctgggcaaacctgcacagtaagtttccagataacaccccaggcctaagtcgaggcttaagggatatgggacttggagggtgtcatgaaccaggcaagccaagccccaaagtctgtctgcagattagcttggaagcacgagttagggggaggtgaggatatcttcctccttgtccattgctctacacagaggaagacttacttggatgtgataaggggctgagtgaaagagaccaggtcttcttggtctgtgcagcattcccatctgtgggcttcccgaggagcccatggagcttggtttggggaaaggaaaggaagggaacaaacgaggtcccatgcagccttagggtgtttgttttgagaaaactgggccactcagccagcaaagtgcacatccggtagctagagatctctttgggcccttctggagagagaggtttgctggaagcatcggctgagtgggagggcttaacacccagtcgttttcctgttgccacgggttagggaccatggcccttgtggtctggaacttagtctgtgccaatcaagcagttgatcctacctcttccttccttcactgacgcacaggaaattactcagaaggcaagttgagcttcacttggattgaaacccactcacctaggaactccggagccagttatctggaagaatccattacaagggtaaaaggagcggggcagccattcaggcagggaacctttgtccctcaattatctgtagccagtcagggcagagggaggctggaacagcctggcatttggattttctagaaggaaatttccaggaactttgcagagcatctacctcctttctgtccacttcagggatgaggaaccaaaagtcataccaggctgttaaggcgagagccaaggcggaggtctggtctggctacttgcaggacttttctagcaacattctgtccttgttaaaatcacagactcaagagcaaattatctaccaggcccacccaccgttcatttggaaataaaatggagctagagagatgctcaacaattagaagcaccctggctgctgctcccgtgcttgagctccatcaccacacaaggcaggccacaactatctgtaactccatttccagggaatgtgatgtcctcttctggcctctgtgtgtgtgtatgtggtgtgcacaggcaaagcagccaaacataggaagcaaaaatttataagtaaatacacacacaaaacagtaaggcaggcttaagtccccacccaaaagtatttcttcctagtctgagccaccactaacaagaacaagcatttttattttatgttatttttattttacactatgtaaaaaacaacaaccagcaacataccacttttcttcacattcacatgggtttgggggacttattgcctttcccctggagaaacaacctatcaaagaacctaagtagtaccacgttgcagaggatgcagaccccagcatcagtagcttgaagacaaccctccaggggcagggagggaaacagtgtcacaatggacagcacacacacacacacacacacacagaaggacactaagctgagtgagtactgaaactgccactgacccaggtcacagtgcacgcctccttcctctgggtgcccactgccacctcctcaaagtggtgacttttggtctagggtccgaaaacactttttgaatgacaccaaagttgcttaaaaagataggctgggcaggttcaagtacgtgtaaaaaccatgccgggagtccaaggtcacagaagaactctaggtgagaaaccaaccctgacagttcagcatcttcttcagccaacaccttgcatgggacccaagataatctcaaaaaacacttctgggttcagattggcaggaacttctgtctggacaaatctagcagagttaacttctctgactgggtggtgaccaccttattccctgaagtgacagagacaaagtttgccaaagttcaaaaaagacagagtaaaaattgtgcttccttcgaaatgaattggcttcgttacagccttctctcctgggctcgctcccacttttgtgggtgtttattgcctttaagcgtgaagtgacaaggcgagcttctgaggagcaaagactaggcgcccctgagaggacggggctctaaagtacagtagtcagcactgctgtgctggtcatggcttggccttcctacagtcccgagaagccatcctcggggtcagtctcaagtgcgcctgcgagcctggtgaccgtcaccacctcactggggcagcgggacagagagaggtcttcagtattgcacaggtctgaaatgtccacaagtttaaaaataacaaaaatcacagttgctcttggggattcactggtagccaatcccagcctcagcaggacgtggctgtggccacagggctcctgtggaactctgcgactgtggggcgggtgggcactggcgccagcactgaggtagtgaacgtgcagtagggagcctgcgtgtcagggctcagtgtctgtaaatggtctgtaaacgtggggctggctgcctccccttggcaggagggaggctggggggtgggtgtggaaggtaggatctcagactcatactgaagaagctgtcccataaagccaaagttgggagagatcacgctcctcctctgcttgacgtagtcgaaggcctccttcaggcggaactgcttggtcttcatgaggtacgccatgcagatggtgggtgacctcgagaccccagcctcacagtggactaggaccttgcctcctccttccctgacgcagtctggaatgaagaaagaaaggcagtaggtcagaactagaatctaaaggaaataccaaatgcaggacacacacaggacaacctgtgtgacctagtgcctccactgtgcaagttcaagggccatggtcctcaagatgacacatacctacagtccatactcccaacatctgagagatggatgcgagggccacaagttcaaggcaagctcgagctacgaaatcagacttataaggggcttgaaatcccaatgacggatgtccccacatgtaggacctttgttctgtttcccaggacacgtgctagacctggaaatgtcctctgcagagacagctctgaacctgtgctctcggtctttattgggtctatgtaatgccccgagtgtctaaggctcaaagacggacctggaaaaacattaagtctctggttctgatccaatggtgacaacaggcagcaacctggaaggggtctgttggattccctgagcaaccctgtgttgctgtgacagggagggatgcttggtaagcttccagggttctcaccatcaaacatacaacaaacagcacccggccactaattatagtcgtggctaagtgacgcttactagatggaggatataaatgacttttgcaaactccatcttgctcaacaatgggagtcactgctataaagtcaccaccatcagttagcattcttttgcttactatggtgtatgtgtgtgtgtgtgtgtgtgtgaagggtccttctgttcctgctctactcttcccagaaaaataactgttaaaaataggaaaggctataggtgaatacatatcaaatcaaaatcacacaaaaagtctcccaattcctctcttgatagagtggaagtaattacctcacaagaagttagatgtagctataactggtactatataagaccatagtattaaataaaaaacaaacaaacaaacaaacaaacaaaaaagccagtctgtggtggtgcatgctttttttttttgttttgttttgtttttggttttttgagacagggtttctctgtggctttggaggctgtcctggaactagctcttgtagaccaggctggtcttgaactcacagagatccacctgcctctgcctcccgagtgctgggattaaaggcatgcgccaccaccgcccggccagtgcatgcttttaaatcccagcacttggcaggtggatctcagagagttcgaggccacactggtctacaaagcgagttccaggacagccaggactattagacagagaaaccctgtctcagaaaaaaataaaaaaaagatgaaaggaatatgttgccctcttcccaccctccaccatgtgcttaaagttcaagaagcctgaaaacaactctatacctaaaagatcaaatttctaagagatcagagaggaacctttgaaatttccagtaagaacaacaactccagagcatgccagaggagcccactggaggtaccgcatgcaacccatcaatccaaaaggagtaataaagagccctgtaagtcagctcacagcagagagacccccagtcctggggattatggggcttgtttcccctcgctccgtccactgccacattccagaaccgaaaggatatggggtgcattgtttccagaactctttccaaacctctgcttctagccacccacatcatcctcctcccttgggaaggccactggggaagctcagctcctccttccattggcagggcatgcgttggggttaaaaaacatcaggagcttttgaaacattgtgggactgtgtccacaaacagacacaacatgcacacaggatgtggagggagggttctcagaactggacgggggcaggttgcatgacctcactcggcagttactcaggtaattaagtaacaggctgagaagggcagagccctcctaagggcatgaagaaaagccaagagttcccacctagaatccaccatcgtggctgcttctcaggctgcaagaggattctcagcctagagactggtgacaaggaaagcctctgtgtgtgcctctggtgagtttgtcaagatttcttgtgacgtcgtgtgtggtgagcaggcccttccacatggctgaagggcctttaattgctgcctgtgctaagtaattacccttgtgtctaaccctgcctttaacaagacgatgtctccaccccaacaagtacgcatgttagagagaaagaaggaagagaaaagggggccaggatcaagagtgtacatttgagacagagaagtcaggctaaatggggtgatgggatgtatctgggatgtgagggcaactgaggcaacacggcagagagctctgaggccaaggcttcagtccccaggcctgtacaatggaaagacgacaactgcttcacaaggatacagggatgcataagttgccaaattttctgtgcataagacacggggcttgaggcaagtgctatctttaatccagagttagctgaaaatgaaaataaattgcctccaaagccgtttgccagaactgcttggagctgccgggggccctcacggcttagtgcgtaaggagtgctccctccatccttctgtttgctttaaaaatagcctaacctacgtagaaggaggctcccccctgctttcctccctcggaacattacacatggacgaactctgctcccaaccggttgaaacaataacaagagcaggaaagtactgccataaaacgatattaattcattcatctcgtaaaaccaaaacttctaataatagcaactcagtcctcccgttgcctttttgatggccaaaactcctgttcttggccccaactcttcgggctgcacacacaagacactctgctcaagctgggcatagcggggggggggggggggggggggggggggggggggtcctgatcgaggtggaagatgatcaggggttcaaagtcacttttgagcgcatagcaaatttgaggccacccagggctacagacttctttctttttaagaaggtaaccataccaagatatcaaaagataataatacatattccactccaaggaatttcccctaacaatggagagggggtggctggacctaccaataaaatcaattgcttcttgaaagtgggagctaatgtcagctgtgtggctgtcctccacggggatccacttgtagtgtaggtgggtggcacaagcctcagaggtccggcgagaaacattcagcagggctgtgatgtgcaggttggcgaggaactcgcacttggatgcatggtaggcacttccaaggtagaggaagggaaggatttcaactgggccaccctagaagcagggacaaaggacaaccaggaaatactgcattagcttgctcatgtgggagaagaaaagcaacaaccctgacctatttgtttcttagggtgggaggttccctttctggttcccaggtagagagttcagagccagggcaagtcagccaagagtgggtggcaccaccatcctggcaaaatctctacccttgtgactcagtgacagcaaaactcacagggaccagagtttcagctggaagtcacagaagtcccagggtgggaagtggtcggaactgaaagggcccttgttaaagctcaaactcccccaagacaaccaaggaaagctggggttccctgaggggcggcttcctaacccacagctatcatggaaaacggtttgacaaagtctcctttacagcattttatatcaagtactgcataaaccctaatacactggtgatctacattttagggatagtaaaggtgccatctcctcaccccccttctccaaaaagtaagtttcctagaatcaaaaatatcctacctacccagagaagctagactcagaaagctgttaaaccacaagcagaggggcttccccacctcgaccttcacacggggcgtaggagttagagagactgaggtcatcacccatatctcaggcttctagttcagaacctccctacaaaggcagagtcaaagaccgtccaccccctaggtgaaacatagctctaggctagacagactcagtaatccgcacatttacagggttctaaggtgccaagcaaaggccagtgactgttggagtcccccgtttcctgccccagaaagagggtggaatggaaattcttagctagacccacaggaagaaaaatggtaagggaccaagaggtggggatcagcagcaggcttgtctcaacccacccagcacttcaggggtttacgaaaaagccaatcatggacacacacacacacacacacacacacacacacacacacacacacacactttttgacacggggtctcatatagctcaggctggcctcaaactattcatagctgagctgggcacagcatgtaggtttgatattcctgcctgtctccctaatgctggcattaaaggcatgtgcttccatgcccaagtctatatggttctagagactgaacccaggggctcaccgtgtggtaggcaagcattctactaactgaggtacataatctacaaccagcatttttactagcacctacagtttcaggggcttgagatataggtactaatcttaaaagagatctgtaagataggtaagaaggccatttcacatcgggttcttgaggcgcatatgtgattaaataatgccagaagtagagcagggacggagaactaactcggactgacttggcttgggtggcagggcttccctgagtctgtttacagctcagtatgggagaacagggtcattcatgttttactccttccagacacatggtctctgtatgtgccaggctggcctggatggaatttgctgtgtagctcaggctgtctttgaacttgcggtaatccttttgccttatcctgacagtgctgctactgtgggtgcgtatctggcttagatttcaaggatttcaggtaaaaatgggaaggaaatatttcccttctctcttgcatttctctagaaatcccctagtaatgagtccacttgcacccctccccctctcctccacacaggacaggcagccttccagaggcagtgtggtgcagaggttaggaacacggactgagcatctgagagaagacctgtagcttctcactgatcaaagctcaggcagcttctctaacccagaaggaaaaccgtggaatttctaccctctgggataattggtaagacataaaggaataatggctgcattattaacttgtacattatgtggctgccatcttcatccagctgaaaaatgaataaatagcatccaccttctctccctggaagacacagggcagatactgaggcccagcaatcccaacaggtctggtcttggcctcagggcagactgtcccgtcccctgcacccagcccagcccaagctccccactggctagaaactataaaaatggtagagatggtagacccttcttgggaaagaggtcaaagactcaaatctaattccattctatggtcagctatagccccatcccagccccatgccccatggcatcattagccaacccctcagagcagcaggctggtcactgcctaaaactgctgagtgactggaaaatgctgatacaacagcccgggataacatccaacttctcctgcagctcagtccatcacacccctaaaattctatttctctcctttcctaaatcttctgctcacctcaagaagacaccaaagctgtcagaatacaaagaggctaagatagcttcgcctgccctctctgtgtaccaggggttccccgggtgagtggtgaggacatctgagcaccctaccctcagtgggcaaaagggccagagctttcacaacctacttctctttcattttctgagaaagaggcagaacacaaccccagttcacaaacacataggcatccagcttagacacacgctgtggcttccggctcgtcccacaggctcatttttcttgaaagcaaacaaacaaaaccgatgcctttggcatctggccaggctaagaggattccagtgaccaagaatcccattagaagcaaggacacctgtttgtatttagaactctgtctccaggtgctgagttttgcccatggcagggagttggcatttttagccatgtctagaaggctcattattaggctttgctatgctctttgttttgagggaaagactgaaaaactccttgcaagccggatgtgtaggtcaaagggcagatggaaaaacagaaggtcctgggaggaaccagaacatggaattgaagagcagccacctaggcctgaggctaccgtggaccagtggctggagtctcgtaaactggcctgacactgtcaagatatcccactggccaatgataagtaccttgccccctgtgagatggcaaggcagggtctgaactctggtttctgtcaggcctggactgctttttccgcaccctcctccatcattttataggtacccagcctcctaattgtcagtgagttatacaaagcatacttttttttttttttttttttttttttttttttaggaaaaacaaacaaaacaaaaaccccacatgcttacagaaacatctagccttctagtatctccatttcctctggtactagaatctttgaaaatatgtaccagaaaccttcaggagacagccaaggatgggggcacaagcctacaaccccagccttgggggaggttcagggaggaggatcttaagtccaggctacccggggctacatgacaagcctatcccaagaaacaaaacagaatgggcctggagagatagctcagcagctgaaagcattgcgtccattcttgcagaggacctaggtttgattcccagcacatggctgtaactcataaccctctgcaggcacgcacggaatgcacacacatacatgcaggcaaaacactcatacacacaaaacaaagcaaacaacacagaaagcctgaaagtgagctccagggaaaaggcattttcaggcttcccagaactgcccaggccagcagcttctcttctctacagaggctgcccagcatcccgtggtccagggaccctagttaggtgtgtgtgctgggagatggcccacttactctccacgggaacccccgtgggcaagccacagcagctctcaaggacagtgtcagttcccatattacaaagcaacagccccagtcagggtgctgaggacggtggggacaggagccggaaccacatacctggtcgtaagctggtctgcaggtgacactaagaaccggctttccacactggctgaggatgcctctctcactttcaatcttctcctgtggaacaggcttcacatccacacagcactcaggatattgcgagtagaaggtctcataccccccttcaaaaaagcaaatgaacaaacaaaagtgaggcaggcaaaggcatggggttcttggactgacaaaaaatatccaccctgactgtgtgagagctaaaacaacaaagctgctaaggtgatgcaacttcggagggtattaaaaaactaacaagagcaagtgagcaggctcagtgcctactcaagccacctgccaccaaaacccgaagacctgattccacccgagaaccgagaacgagagggagaatcaattcctgcgtgctgttctccggcctctatgcgaactatagctcatgcatgctcaataaaagcatcggtaaataaatgcaattttaagaaaactgacccaaaccaccagttttagaataaaaaataatggaattcactcacacacaccacctccaccttacacacacacttctaaaggtctgtcctttggagctagagagatggaaagctcagcagttaagagcacctgttgctcttacagggctggggttcagttggcagcacccacatggcatctcacaacagctgtaattcaagttccaaggaagagtctaacaccttattctgacctccttggttcctgtacacacacggtgcacatacactcacacatacacaaaaaaataaatcaagtttttaaaggtctctcacagagaggcaatgattaactttctgtgtctatcagaagcaacttatctggcatctggcaaataccaaccatatccccccaggaagcaaaacaacaacaaaaagcattttttcctcttgtttatctaaaaacaaaggtgtgaatatgcaaaatttcattaatttctatgacgactcccaaactgactttttcccttccccattaactctaggcaaaactacaactgtatcttctcccattcacagaatcgtggtgcccttactccctcctaagttcctaaggtcactggcaagccttctgtaggtctaatttagccataaatcaagccaatacgtcctaaaccaaatggaagaatgcagaccttctgggcatgtaagggcgcctctaccacagttcaattcctccagaagggtccacttgaggttaaaggggagcctctgaaggcaaacacgtttgcatatgcctgtaatcttagcaggtggagactgagtctggaggatcatgagttgaaggccagcctgggctgtatagcaagagccctctcaccccccccccccaagtaaggtaaaagtgaccttttacctttttaaaaaatgcacccacatcaatagtctccagaccagtaggggaagaaccagtaaacttggcctggaggccggtagaaagccaaagcattataggtagacagaacactcttgcttaggaaccttgtttcacaaacagcaagtgaggcactactgagagtctgcaggaaacccacctgtctttccctagcctcaaggattcacctggtgtcaaatcaccagttgcatcagcatcctgagccaaggacctttccaagaagcttcctgtgtgcttctgtctctggtaatagagagcccgcccaatagtggaggcctcactcctgcagtcagcaaatggttaatggattacccggcagtctctgactccctcccaggagctgcagccaattcctagaatgagtcatactgtcattctggcttcctctcagcttctgccccggcccctgcccccatttagtactcccaaatctcccccatggtaactaacaaagagcccaccggctccctggagaaacctcgagctctccacattctctgtcctcaagacaaggagctaggctagacggggaagtgagtggaggtgcaggctatggggcttagcttccccaggcagccccttccttccgttctaggaggcaactgaggcacacagcctaggagttgggggggggggcatttgcacctcctagtcaataaatcacagggataggcctgagttcaacagtttgggttccaggaaacaatacgacaggtttgtgggcatctggagaaagaataacccaagcactcccaaacttgagtacaagaagccttcaggacacctcatctctaggccttaaatagaccatttaagagctggcacggagggagggagggagggagagagggagggagggaaggggagtggggggaaggtgttggttagggcctgagactgcttgccagttaacaaaataaaacaggcaaagtgtctcagtgtagctgaaggacagataaacagggcttgcctcttcacactggggtcaggagattaggtctctgccctccacctactcccaccggaggtgtggagaaagaacattcctctctggtgtctcatttatgcctcactccaattgcaagagcacaagcaattcctacggctgcttcagagtgagtgattttcagtcatcactgactgccagggggacagaggcagaatatacaaggaagtaccggctacccgcctggtcctcatcgccccttttcagtgggagaggggactgtaggaagtgtgacaggcctagcaccatcatctggatgccagcaggtcaaaccccaaatgcccacctggacatgtgctacctaagataaaggaattctctgcagcagtttgaacttcagcagtgttatctgggtagcaatttctaccgaaatcctcaaacgcacaccacttttgatcttggagttttcatggtttgaatgaaagacaagactgcacacgccagagctccttacaaggacatccaccctttcattcacacagccaggctggaacaacctcacggccatcaccaggctatcaagaacatggtgtctcccaagatctagcagggtcaaagaggcaggatagggaaatagacggatttgttactggggagaggagctaggtgttagggtgtgaggaagacatacatttccttatacacactttgtgtattcattttcacctggctatatgtcccttcatttttcaaaagagagacttctgcagagctcagagaaggccaccctgtcacaccctgcagctgtcatccacccctgttatctcccaatgggatcaagaagggacagttagcaagaggtgttaacagatagggagctactgaccagcctctggaatcttcctggcctgcagtgtgtgaaattcaaagtcgcaaggctttgaaagagtcttccattcactgcatctgaattctgagccacactagggttcctgcacaaggtgttctgtcaacccggctctggggccctaatcacctctgcacccaggccagggctcccacacttatgaggttagacggcaggatcagtcacaggaaatgacccagaaatcaatgatgtggggatgtggggtttgagagtaaatcacccacccacaaccggaagccaaagttatctccccagcaggtgaaatggttgggcccggaggccgcccttgaaggcctaaaaccaaaggccacagaatctcctgcatatctcactgcccctgcggcacctctcctaactgggctggccagctggcaagtctctaactgaggcagtcagtcccggggacaatcccctgctggggaagggaccgggaaagggacgggaaagctgtcagctccaaattaagctttaagctcgagaaaggccaaggatgggagaaggaggctgcaggaaaacaataaaaagcaataaagcgagaggaaggggagggacttgcccgggtcaaaaaggcaagaggcccaccaagacacagcctaacgcacggtaattgtctaggcgggaagaaaggggacaccgcggcgccactggcccgggggagggtctcgacttgttcgatcgcgccagatcttgttaagaaagactcggacccccgtagtctgcaagcggcgccagggcccagcacgagccctcggcccccggaactgctaaggaacaccgcccgcagcaccttcccagcccacccggcccgcaggacggacaggttgccagacgctttcgaggaaaggcgcctgggtggggagcaggaagccccggacgctgacgcttgcaaggacctcccaggcgcacgcgaaaccccggggtgcacactccctcgagttgcgactttctccctgcgccgcgcggcgaggggagcctggggaccgcggtgtccccggcgcagggtgccgggggagcggggcgggtggcagggggcccgcggctcccgggcgagctcacctttaaggaagtagacccgcgggccggcgggcaggcaggccagcagcgaagtgagcacgacgcgcgcggcgctctcctcgcgcagcttctgccagtggcggctgccctggtccagcacgaccacggccgccacgccgccgccgccctcctgcagcagccgggcgcgcgccgcctcgtcgggcagcacgtagcgcgccgacaccgcgccgccccgggcccgccgcagcaccaccgagttgaggttgacgttgagcgagccgcgcacgctcgacgcggcgaaggccaggtagggccggcagtcgagcaccacgcagcgcgcctcggcctccttgcggagcattttgcgcagctggcgcccgtcgagcgacgtgaccttcatgccgccgccgccacccagcggcccaaggccggcgtgcggggctgtggcctggcgaagggagcccggcgcgagggtcggcgcgacgctctccccggcccgcgaggctcggtgccccggccccgccactcgccgccccagaaagccggggattccgccggcagcgcagcgttttatgtgaatgagtgcgcgtcctgtgacgtgactgcccatataaggccaaatatgggtgtttccccgccccctcggcgccggccacgcccctgggcggggctgcgggcacccgcctccgccccgcgagcgggatgcaggcttagtcagagcgagaaagaggaagtggcgggcgcctgccgctgcctctctcgggggcccggcgcggagagtctcactcacacatcacccggtgggccgaggtgacccacgctgtgcgggaagaggaggaagcaaacccggttcgagcccgaccccgggccgccccgtggtacccgggggcctcccccgggtgcatcccgaatggattcggattccgggagtcaggaggcagcgtctgagatgacccgaggcggtgcatggcttggggatcttaatgctggaggcttctagcacgtcctctctctccacttttgctgtgtcctgattttccttaataaaaagtttctgaaagtaaacacacaacccaaagggggaagttggaagtgggtgagacgggagagacagcagaatcaaacggattctgcctcagaaggatggacggccccgcttgtgtttctctccgtagataagaacggtatagcgccagagctaatgagaccgtttcaaaaaacaaataagcaagtacaatacaccaatttaggagctgttctgttgttccgggacgcctgtcttgaactcattagcagcagggtccacatggatccaacagaggggctcagtccactaaacttgtccaggtggcttctggatttgggcaggattatggtggatcagtgtaatcccaggctgtctacccccgccattctctcccgagtttcatgctggctgcctccattcccggaaagctaggtgtgatttgtcccctctgcaagtatttattgagggctctgctagccaccaggacacgtgagctgcaaacgcgtctctgcctccaaacccattgccaacgaaccattttactgttaatcttttggtgaaaaaaacatctgtccattagagggaagtttatttacaacagacataagggggtgggatttttaagagaaagcagaaatcaatttccgagatcaaatcaatcgaccccaacaacagtaatagctggcattgcatcaggaccatagatagcagtgttcagtcaaaagtcctgagtacacagtgactggcctgtgatcccagcaggcgtggggtgggggaagagctgagaaaccaaggccatagacctgtctaaaaaaacaaaataagtaaacaaaagatgccggcctagccctgactgcggtccccctgatgccataggtgggttttgttgtctggggttatctgctgcagcttccccataaccggctcttcatcaggagggttctgtctgagtaaccatcggtctccaccccctaggcatttcattccagcgaagacacaggggctagactctgtgaggtgtatggaacaccactgtacgcaggattcactccatggtggggtggaagctagaggaagtttctctgagatgagagctaggacaaacttccaagaatgaaaagaaaacacgtgatgttaaggaaacaatagaacaaccaaagaaacaaaaaaaaaaaacccaaacaacccagcatactatgtgctggaggtgcgccaatgatgactgcagaagctcagctcagggacaagctcagtattaagacacgaggcttctgtgctttctcggacaaggagaaagtcttgtagtgcacatggcaaactccctgcctgtccttgtctccccagggatggcatgagccctgttttttttcttctctttggttcatttcctttccctgatttttggttacgttgtttactgtatggtttgttaattgtatttattattatcatttttgttgttgaggcagggtctcacttatcatctgcttggtcagttccattcctttcatttttacccacttcctgatagggagggaaaaaccaagctatttgcagctttcctggattaccaatattggcttctgtaactacatggttttgtttgtattttattgctcttctatttcttgccttccttggtttgtatgtgtgtgtgtaagagaacctttccttccaccatgtagaacctagagatcaaactcaggatctgagccttcttcacccaccatctcctcagcccatgaatacatatcttgggtgcactttctccccacaaagctgtaggctgccctgaagattgtgataaagaccaggccaggctggaatgtcaccacagagctgcagtctagagcccttcgaccctcactcattaatgctctgatttgcacagcagagattgctcagctggaagttaaattcatagtggctcacactaaggtcctagagttcacatcagccagtctgaactaccctccctccagtggagtgaattacatgccccgaggctgcacatcctagtgtaagaagacatcctgtcaccgttgccccctggccttaagctgcaggtgttgctcttcgtactgcccagcccatttgccttcttgtactgtattcaatgaaaacttgtcccattcttaaaatttaaaaataattaagacatttagatcttatccactggggctggcttcactagcatcgcttgttgccccacacaaccttgcatctaaaagcttgccccagagttttcatcctgtgctgtcattttggaatatttaagatttgtacaggaaccccatgtttttgttttgcagttgaatcccataaatgacaaggctgatgctgtgcagnnnnnnnnnnnnnnnnnnnnnnnnnnnnnnnnnnnnnnnnnnnnnnnnnnnnnnnnnnnnnnnnnnnnnnnnnnnnnnnnnnnnnnnnnnnnnnnnnnnnaagccagggtttctctgtattgctttggagcctgtagaccaggctggctttgaactcagagatccacctgcctctgactcccaagtgctgggattatctctagtctggttttaagaatgaatttgaacagagagcccacctgctctgcctcaaaaccttccatggcagacagataaaaacccaaattccactgggggtggtggtgcacacctttaatcctagtgcttgggaagcagaggcagataggaggctgggagtctacatagtgagaccctgtctcacataaacaacaaatccagatgccatggagccgtcttttctcctccgtccctgtacaaggatccttcccctccacacagatgcagccacagctcagctctccctcccccagcctgacacagggtgttaacactcctgccgcactcagggcctatctgatggctgagtgtccctcgaatggtgcgcaccaggcagtgccggtggaacggaattcatggcgtgcagagagacatggagcagcccgccctttgggggcacccagagagccagtgggcggcaacaggaatcagagtctgagacactgggaagaaggcaaggtggggaagatccactccacagccacagtctcagtggaaggtgaagaagtgtctcagacaggagagacatgcctgctgatttgtcatggggtgagggcggactgaaggcaaaagcagaatttactatgatgaagccgcaaggcagggtcttgtctcatttgttagtttctcccctcttcccactgagctcgtatttccagaggcttcccaacctttgtttgatactcatgctttgctcatcggtgtcttgcacttggaaggccttcgtcaacattgggcctctctttggaaaagcacacacacagtattcagctacagcttttggggagctcatggacttagggtaggtatgggctcactgccacctcagtaggatccctagggctcttgcctagccctgtgtggaccgggcaggtggaagggatgggttaaggagtttctttccacagtgcagagctcagagcagtcccatgatgagcccagggtctctacaagccccagtcctcctgaaaggatgtgttttgcccccctcccccagcaatttacctgtatacttcacattataagagcagtgtgtgcttgccagtgataacatttttaatgatgaagtaaaaaaaaaatcaaagaagggagaaatgtgtgggtattttttttaactttttattacatttacttatttactggtggggatgggcacaggcatgtcacaccatgcatgtggagttcttgggggtcgaactcaggtcgtcagggttggtggcaagcacctttaccggctgtgccatctctccagcctttgtcttttttttttttttttttcctcaagtgcagcatttcaagctaacaggtccagatctgacacttgctttgatcttagcggaaggaaaggaactgcgttaggaatcaaccatctggattgccgataccaagtctccgctgccctgtgtttagtcattgctctgctatttagagtgcacatgctctctaaatgcacatttccctccctgtggcatccccacctcctgtcccctgcatcttagaactgaacaaagatgatgctcattccaggacagaggcagcagttgtgtcattgttgtgaaacggctcattttctgagaaccagagtgacttgctcaggtatcacaaaacatttgacaagtataaccccgaaaactgacaccatcgtgttgagtgacctcctctctcctgttcacaaacagtgccaaaggccctgtccttctcagtcacagttaggcttcagtctctctcactgcccaaggagtcagctagtaagctttagtcacagctagcataatctgtattggccctaggaagacagtttgcccaagaaaagcagggcatgaggactaagcttagcacccggtgctgagtgacaagaagagatgctgaagacttcagctgtgactggggaaggctgggagaaggaagggttgcccggggagggtttgctcatgcacaaagaggggaaaggctgtaactgaaagagacactaacccacagggagtgggaggaaggaagcagccctgtgtcatttcctgggagggtgaaccctcctcgtggggggcagggaggttctagaatgctgagaaggtgggggaggtgagagagaagaacacctgctgtgtgccaccaagcgtcgggcactcaaggcctaaaaatgtttattcccttttcacctagtaattccacttctgggaaataatcttaaaatctaaatacgagggaagtaaaagtatatccacaagacagtttatcacagggctatttataagacggtaaaactggaagcagccaacacatctcaaagaatggcaaagaaaatagtatgctcagcattcattaaatgtgacactctcagaaacagcctaacactcccaatcgattatgctaacacggtaaggaactgacgtttacgataacagcagttgtcctttggcactgaccgtgctttccatagattgtcccagtcacaccacagaccaggagggtgggatcgtttaaatggaacaggtttagaggctcacccaataggggacgcactgcagtgggactgagcctgaacttctccagcagtgggctcccacaggtaccttctatggtggggaccagaggcagggaggccaccctgacccccaccttgggagaaaatagttaactacagcaatggctctttcttagacataggaggtacaaggagtggtaattccccaccccctccatttttcttcattttctaggttaaatttttaaagttttatttcttgttattctgaggagagggcaatatggtgcagtgtgtgtagcagttagcgaactggttctcccgtctttaactaggttcaagggaatggaactcatgtcctcagacttgcacagcagatgctttcaaccccctaagccgtcttgctggcccggttttccctaaaactttcctaatggaattgtggcatcctgtgtgttctttttcggttttcagttatccatggtgcatgtcggtctgcagctagctttgccctcctgcctcgttttctgtgtgtcttgatgacactatcatcttctgatgcttttaatctttttgtgggaggagttcaggggaaacacaggctgtttcgagtatgggtttggcagaatttatttaccttgaaggacatttatgaggtttctaactttttttttttttttttttttttttttttttttttttttttttttttttgagacagggtttctctgtggctttggaggctgtcctggcactcgctcttgtagaccaggctggtcttgaactcacagatatcctcctgcctctgcctccctagtgctggtattaaaggcatgtgccaccactgcccggtggtttccaacttttaattgatttgttttgggcttttcaaacaaggtttcaagtagttcaggctagccttgagttccctatgtagccaaggatgcccttcagcaccggatggatctgtcacacctcccaagtaccagggttacaagcatgtaacatacatctagcttagaaggctcctaatctttcactgatacagacaaaccagcaaggagaaggtattgtttgcttttcacagagaagatgcctttcacaggatgaaatggtcaccttgttaaaaatggtggccatctgggatgcaccagtggtacagcaaaggccctggattctgttaccagaacccaaggaaagtgagggtgcgaccaaggaagcagtttctccagcagcaaccccccacctcacccctggcacacccgcctgacacttcccctcagcacattcctgcaggcagacttaccaggacatgtttagggctttttcctttgagggaagttacggaccacatcccccacccatccctgccaaccaccccattgacaggttttagcatgtggtcctggtgtgtgtgtgtgtgtgtgtgtgtgttcacttgtgagcatgcatacatgtgagtatatgcttgtgggtatgcatacttgtgtgtatacactcattggcatgcatacacgtgtgagtgtacacttgtgggcatgcatacatgtgagtctacacttgtgggtatgcgtgtgtgggggtagggggtggttgtgtgatggtaacaccaggcatcacacaaaccggggtatggtagataaactatccctgaaatacatccccagccctttttttcttgacagagtcttgctgttcagcccttacagccctccacagatactccacagacagcccaggctggctgaaactcctggcagtcctcggcctccctagtgccgggattactgatgtactgccatgcctggctaagcagcttgattctgtttagctttgggcaaatcctcttcagaaagacagttagtctgctgcccacggggcaccaggatgcaaacgtgattccacttaattcacttctcctctttccctggaggtgtttcaaaagcaaatgtcacttgaaaatccgggaacctcagccaattccttacacctgccgtgcagcctgcagccagctttgttgggtgtcctgcacgactgttccaattatgtgacggaaagggctggagttagagattttaaacaactcaggcctttggctatgactccttagaccctataagacagtcacagctctactcccaactggctgtttgatcttgggcaagtcagtttctcacctataagtggaagttccctgacagagtatggagggaatgaaccaccattgtgtagtaccagtgagtgaagctatgaccttgggcacaccaggatcataggcaggaaggcatgttgccttcctttctctttgcttgagaacctctgatccaggtgcctcatttctcaggcagtcagtgagatggtagcttgaagccacataagcaaaaagacaagatggaccgtgagtgaacacttttttgaaggcagctcctaaacaaacaggagtccaaacctgtcctgctgctatgctggccagcacactgtcccgtggccttctcacttttatctttattcgatctcttccgcttagcatcagcatccagaacaacaatctatacctaagaggaaaggcatcaacccagtgaactttaaagactgttcaagatgtgttattagaatcaaaatctgggtgtcagggcagtggcacatgcccttggaagacagaggcaggaggattacctggagtttgaggccagctaaatttcatattgaaaaatttatcttaaaaacaaaaacaaggggctggagagatggctcattggatatcagcactggctgctcttccagaggactcaggttcaatccccagcccctacctagcagctcacaattacctttaattccagttccagggaatctgatgcttctggcctctgagggctgcacactgtcacccacacagatatgcatgattaaaaacaaaggtaaatctttaacagcaacaaaaaagaaattaaaaaacacattgaattcttgaaaacactctagaagataaattgtttgcagtacatataactattgtttattcatgatataaaagtttctgtagcaagaaagcaaagccagaagttcagccataggaagctgagccgtggagaacaagctcaagagggaagtccaggagactgtctcatcttccccagtcaggttctgctgtgtactgggaacacctgatttgctgatgtcatctctatctgccctttttggttcttgtacatggagacctcaccagatagcacaattccctctgtcctggattctctcgcttgggaactccagctttctcgttcaatttctgctggatgttttgagtcctgtttgctgtccatccatccatccatccatcccttgtcaatttattcttctactttggttttttgtatacttaataaactcactcattcacaacctaaagtatagctgtcgtagacaattccctgtaatgtatagaacaaagtaagatgacagcaataataaaactgacctcataaggttgcttgtcaagctaaagaagaggatctgtgtacccagcacaacatttgccactcagtagacactcagaaatggactgagtattactcgtatctccaaaaggaacacgtgtgtgtgtgtgtgtgtgtgtgtgtgtgtgtgtgtgtgtgtgtattgtatggctggcttgtgtaacatgatggtgtatgtatgcatgtgggagctgaaggcgggaggatcaatagaggccaacttagactacacagtaagaccagatttcaaaaatgcaaaaaaagtacaggaatagagagatgacttaatgaactgtgtgttcaccatacaagctcaaggactatagtaagaatctcagcacccagctaaacattgggcaggtagagtgcgtgccttggatcctagctctcaggaagcagagccaggggatccccggggcaagctggctagctaatcagttatctgtgggttcaatgagaaagtcttgaggaagactagaggcatcagcttctagcacctgcaaacatgtgtctaacatggatgttggtttgcatgggaatggcccccataggctgacatgtttgaatgcttggtcctcagatagtagaactgtcgggaaggattaggaggtgtggtcttgctggtgtaggtgtgtcactgggggtgggctttgagggttcttttgaaaccataccaggcccagtctctctctctctctctctctctctctctctctctctctctctctctctctctctctctccctgctgcccaaggatcaggatgtaaagctctcagcaactgcttcagcaccatgtctattggctttctacagtgatgatcgtgaactagtcctcaaaaactgtaagcgcccaattaaatgcatgctttctttcttaaaagtgtattttgttttacctatttatttttatgtattatgtattttatgtatatggatactttgtcttcatgtacatctgcacaccggaggacagacaggtgtgagctgctgtgtgagtgctgggaattgaactcaggacctgtggaagagcacccatgatctctaggttcagtgagagaatctgtctcaaaaaataaggtgtcgaacaattgaggacgatagccttcatcgacctctaacctccacatgcacaagtgtgtatgctcctgccctcagacatgcacacacacagaaacagacagacaagaggtggtgatgcagactggtggtagggcatttgtctagtgtgcccgaggccatagcttcacttgctagtactacagaggggtactagcagtgagtaaagcccttctgtactctttagtagtaaagagagggggcaaagaaagaattggaaagaaggaaaagggggatgaatgggtgcttgtgaaaaccactctgctctccagaaaaacataaggaaaacactgctgttggagacgacaaagacccggcagacagtcttgactcccactatggattagcctttgggaagatggagaaggcacaggagtttgtcttctctcttgccccttgcccgggagcagcagcagtagtcgggggggggggggtagttgccgcatgcatccgcccatccagggactgtgcatttcatgcctgttgaacatcagcaccatcatagctggatgtacgtgactgtaatcccaaggcttgggaggtctctggaggcacaaggatcagaaagtcaaagccgtccttggctatatagcaagttccgagtcatttcagactacatgagaccttgcctcaaacaaataagcaaaactgttttgttagcaaattatcacacttattcagatctagtgctggcatggcatgttacactgccttgggacttgcaaagcaggtgctctggtcacacactgcaaagcccaggcccaggagattgcaggtggcatcacgcacccagccttatatggtgcttccgagagaaagaaatcccagtgctgaaaggcaaacctcggaagaagctggcctactgaccacgaccacatcacacacatttgtgactcaggcatgactggaagagcttcccacaatacttacatctgcatcccaccattccccttccattcagtctcccagactggggcatgggctgtggactgcactgggccttcgggtagtttatgatggaaacatccacctttggccacactgcaccagccttcagcccctagattttcaaaaacactaggtgttcagcctagtgtctcatctacatattgcaatcatagtgtgtctttacgctggattgttccaggttgataatcttacctttattttgttttctcttaggcttcaaaacaagctgatgaaggaattaaagttcctataaggaagttaggcctgtggggtgaaaagggacaggttcatctgaccccaaacccaagatctcctgagcttccctgggttgctttgatcctgatgagctattggactttctgttgcttatccaaactactttggcaaaagctgggttcgtggctgtattcttcaggtcaaagcttcctgaatgaggtggaattgtctccagaaagagaactgggctgagcccccagcttctgagtcctctgtcctacagagcttctgtggaactttcccttgcccgtgaatgcccagtctcccttgcttttcacaagttcatcaggctgtgagcttctagtaggaatgagtttcacttccccagagctgtccccctcagggcagcgcacagtaggcatgtcatggagagatggctcagtgagtaaagcccttctgtgcaagcttgaggtcctgagatcagatcccacagagaaagttagttgtagtgacacacgactgtgatccgagccctgaggaggtggaggtgggcagattcttggagctcactggccaggcgagttaaattggtgagacccaggttcagaaggagacaaaaattaaggtggagagcagttgagggaattgacctctgacttccacacatgcatgcatatacccacactttttcatacacacacataaaccacccctcaaaaaagatttcagacataaacccaagggctatatatttttctttgtctcatttatttatctttaatttgttaagtactgtcagtctcaggtgctaggcaactgagtttcctgatgtcttggagcttctgtgtggtgggaaagacagaaggaatatattcagcagaactagcttttgggtttgggtccgtggaagcccattagaactagaggccacaaagacctccctgaagagtcagcttccaaaatggccatggattgacagagatgagctatcaggtccctagggctggaccatatttaggatttatggatgctgatatgactgcagctccgtgggaactgagggttgggcaaggatgaaccaggagatgccagccaggctggactgtatagggtcttccctgaaggccacagtaaagattctaacccagctaggaagctgttagagaggtttgaaatgcaagacagtgatcttgggatgcagtccagctgataaaacacttgtccagaatgcctgaaggccaaggaccaatctcagcatagcgcaagacaggcatggtggcacaggtctgtacccccagtacttgggaagtaggggcaggaagaaaaatgagcccagggaaattttttttggccatatagagagttcgaggttagctcgggctacaggaaaacaaacaaagaaaccaaaccaaaccaaacacagagtgatgatggaagcatagagccccttgggatggcgacagtagagaggacagtgtggaggcaaagactagttaggaggcctctgtcacagtctatgggaggccaatgtggcttggaaaagaagagaaggaatttgtgaaaggtgggcagaaagcagtgacctgcaggagcaccagggaaggagaaccaagcagatctccaagattcaagagattcatgggagtgaaatttcctgacactgagagaataaagcaagagcagaatgagggggagagaagccaagagttccagtgtgctaatgttgacagtgacaggctgcatgatggccccaaccatggctcttcagagcctgtgaccttacctagagaaagggactttgcagatgggattaagtcaggaatttggagagcagggcattatcttggattatctcagcgagtcactgtaaacacaagggtcttgaaaaaccaaagagggagggacagagtcagaggggttccatgagagagtgactgaacttggcttggctttgtgtttccttaagatagaggaaagcctggtgtggccccagcgagcatggctgtaatctcagctctcaggagacttggatgggaggatccatagtctgaggcccgccagccagccagcctgcttggtgagcccatgccagaaaacaagggtaaaaaaaggaaccgtaaggcatggactgtagacatcaaaggagtaggcaagagtcctttcaccctgaagccttcggaatggtacttcttctggccccttgctttttagcccaataaaacccattttggacctccagaactgtaagataatgtgtttgtgttgttttaagccaataagttcatggccttattacagtagttgtaggaaacagatatccacgtggagaggtgttggcctgaacccaatggactcagtgaggctcaaactgtagactctccagcatacagcaggaatttgcttgacatgggttaccagtcgctcgcaggtggaaagcagacggtttctaagcagagagcctttggcccaggggaccagagtggggcctgagctgaatggccttctacaggatcaggcacggtgtgtggcaaaaggtgagctgaaatgtcaggctggctccagtctctgtgcataggagacctcatggcttgatcttagctgtcccgttggggaaggtgaaacccagagagatggaaatggttacttagcatctgctaagtgccaagattcagatctggcaagtcaggactggttaggaatctgcatttttacaagtgtcttagggttacttgcccaaggtccacagagcacatggtgttgacaaacagtggccagcaggcagagacggtcacgctgaccaacaaaccctgtgaaatctgaagttcttactggaggagtcttagttacttttctatcaccgtgacaaaacactgtgaccaaggcacctttaaacaaaaaagcgtttgtttggggatcgtggttccagaggacagtaggggtcatgaccgtcgtgtcagccagcctggcagcagacaggcaggcaggcaggcaagcatgctgaggcgacaaccatgatgcaaagagaaagagagagctaactgggaatggcatggacttttgaaaccccatccccacccccagtacccacctcctccaacaagaccacaccccttactgttcctgaaaaattctactaactggggatcaagccttcaaatatataccctataggggttgttctccttctaaccacaggagattaggcaatgagacattaagtcactctgtaagtgccatggagaaaacttatcacaaccaaaaagagtatccaaaagaccatgtctccaccaggtcataccagacactctccaatgacagatgccatgcaccctctcttcatcttcaggcctggggtgaacctgcaggaggctctctataataaatgtactgatacacaggagaatttttctaggtactccccagctggctagtcccgaccccatagaaaggatctaaatggttcacgtaaacccagaggaatggggcagaatgggagtctaggagacggttcccagctctgatttctctgtggcttgactggaataaggacttcatatcgtggagcctagagaattcagatgcaaaggaggccatggggagtgtgtgtgtgtgtgtgtgtgtgtgtgtgtgtgtgtgtgtgtgtgtgcatgtttgtgtgtgtgtgtgtgtgtgcatgtgcatgtttgtggtgtgtgtgtgtgtgtgtgtgtgtattggggagtgggaatggaggggactggggggtgggaagtggttctacagcctaagcagacttcccctctgatcgtggcttgaaatgcaaggcctgcatgttacatgccattgctgtttactcagtaagcatttatatttatttacaagacagccaagagtttcagctttgaggccacaggatcatagttacttgaatttgtgctgcgtactaataaaactttatgtagagacaaacaaaaagagtacttaagcaactaccatgagcccagccaggaaaaagatacaatggtaagtctgtgtttggggaggaaagacaataaggcaaaatacagaatgacttttagaggtgatgaaagaaatatagccgagtaacagggcaggggcagggagcttccttttcagtaaggatcactggggaacagtgtcttttatttttatttttttctttttaaattttttttattattttcatttatttatttttatttatttagttttttgagacaaggtttctctacatagttctggctatgtagggcaaactcacagagatccacctgcctctgcttcccaagtgctgggattaaaggcatgtgccaccactgcccgtattagatttttttattcttaaataatgcttatttggatttaattaattaattaattaattaattgacacagggtttctctgggtaacagctctgactgtcctggaactcactttgtaaaccaggctggcctggaactcagagatccagagttctggggttaaaggcgttcgccaccacactgggcttaagaatttttgttcgtaagcaatgcttatttgaatttattttatcaatagcatatatacgtgtgtaattttcttttcttttgagacagtgtctcacacatcccagacgtagctcaggatagctctcgcaagtctctctgatctttctgcccctctcatttccatcccactaggccccctttcatcccgggatggaaataagggggggaggggaggtatgatcaaagtgtactttgtacatgtgtgacaacacgacaaaacccctaatttcatgtgcataattatgctaaaaatatcctggggcacagtggtgtgtacccacaggacaaaaagggaagatcagagaggtggtttatcctcagcttcatctgggaagaaagatcagaaaaaaaaatgaggctttcttgtctctttcttttactctctttaagctaagcctgagtttgaggttccagccccagaggcgctgaagcagaaagatattcccaagcaagaggtgattgtgtccctgggtatctgcctgcatcatctaaggactcataggtctactctcagggactctgtaattgtgaaatagtggtcgcgactgtggcaaacttcggtggaacgacatgccaaccctgtctcccttgagtcacagtgggttttcttctttcattttttttttccttttaagatgtagcctaggctagccccagacttgctatgactaagaataacctgaacatgtgcgcctcctgcctgtgcctacctctcaagtgctggtattgcggatgtgtgcagctctgagtggtgctgggatccagccccaggccctgtgcaagccaggcaagcagataccaactgagccacctctttctcccttccactcagtctggaggcccacccatggggtggggctgtccttcccacctcgttacatctctctggaaacactctcacggacactcctgaggtttgcctcctcatcgattccaaatcttgtcagattgacagtggagactgaccctcacagaattttactgactgggaggctgactctgagtaaagcaaaattgggttcagggcaagcagtcacctccccaacagtcagttgatacacttgcctgtgctctgtctgatacaatctgccatcccttacccatcctctgcaggaactgttgggtctggaggtcacagccatggtaccctcaggccatgggatgacagctgggctttccggctgctggttcccaccaggccgcccccactagcctatctgctgagtgtggaccgctgagggctatggcttgggggtggtgagccacagcaagctcagctgggcaatttgtgctagaaggaagagttcctggcccagagctgtgttctgttcccatcctgcctccagtctgccccctccacagccccagacttccgcctgagtcagcccaaggcctgcgtgggggcgtcctctggtcttcggcaacatcctgtgttctgccttctgcatacctattttccattcccagggaattcctcccatcagggttccgtgtttgttttgttttttgtttgtttgtttgtttgtttgttttttcacccaggagccaaacagcccacagaacaattaaaatggttcccctgaggtaccccagagccatccctgcattacacattctccttcccctctccggggtctcacaaggacctgcatccttcatccccaaaggcgccaagctctccttcagtttcactattaagatcgtctgttcactgtctgtcccgactccaccgagctgtctgaaccagtagggtgcacagctaccataatgcctgcccagcaccctggcatcctctctgctggccagagatgctgctcagactcaactccctgagattagccaccaatcaccctatgcattttcttccagccatcgtgactggcccagagagagagatgtgactcatactggccaatgagaactggcctgggacaaaaaaaggcctctgtcattcctttggatttgatgaactgcaggatacaggctgcacattctttctcctaccttgtcagggagggactgctatcattttaggaaaaaccaggtctaacacaaaaagagaggcagaaagagtaaaaatataagcttttttttgcatccatgatgccgttccccttagtcaccgagccaattaatgtatttacttccttgttacttttgcttagactagcttttggtgtcgctcacttgcaatcaacagtcccaacatgcacagtcatggtcagggatcttatgacataccaaaagcattgataccactgtcttcttaaacagacaatcccctcagagcaggagtcatgaagcacttctttaaaagcgttcttctgttgtctttataggtctgttttaaatgtcttttgttgctgctgtttgttttgagataggatctcactttgtagcccctctacctcctaagcatggacattacaggtgtgtgccactaggcccagaaattgtgttttagggtatgaaagaatataggtaattgtcgtggcgttttattgctgtgaagagataccatgactacggcaactcttataaaggaaaacatttaagtggggctggcttactgtggtggtttgaaagaaaatggcccccaaagggagtggcactatcaggaggtgtggccttgttagaagaagtgtgtcactgtgggggtggcctttgaggtctcttttgttcaagcttccctcaatatgacggtcagttgactttctgttgccctctggtcaagatgtagccagcaccacgtctgcctgcctgccaccatgctccctgtcatggtgataatgggctgaacctctgaaacagcaagccaccctctcaattaaatgttttctttgtaatagttgccatggtcatggcgactcttcacagcaatagaaaccctaactaagactaagttaaccctaacttactgttcagaggttttgtcccttattgtggtaggaagcatggtgcatgcagacagacgcagtgctggagaaggaactgagagctccacacctggatcagcgggcagcaggcagaaactgtgagccacactaggcctggctggagctctgagacctcaaagcctgcccttggtgacacacttcctgcagcaaggccataccacttaatagtgccacttcctgagtctatgcaacccattgttattcaaaccacctcagaaactaacaaaatttttggcatggtcactcacacctgtaatctcagcagttggacagttaaggcaggaggactgtcaaaattttgggccagcctgagctacaaaataagaccctgtctgaggggttgggtgggatttataatatactatgcagcccaagatctagatgcaccaggccattgcctaagtgttttgcacattctttcttggtgtaaaagttttaaaacaatttgtatgattttcttagaaaatgtcaagattgctgagaggtgatggcgcacgcctttaatcccagcactcgggaggcagaggcagatggatctctgtgagttcgagaccagcctggtctacaaaactacacagagaaaccctgtctcaaagagagagagagagagagagagagagagagagagagagagagagagagagagagagagaaagagagagagagagaaagagagagagaaaagaaaaagaaatgttaagattaacttgtcctccagccccagacagtctccttatttagtccaggttgttctcaaactcttgatccttcagcctcagcctcctgggcctgtgagtattcacatatggtgccaggtgcttctagaagctgtgctctaagggagcagctcttagtaatgtggtatgcgtttctcactgttgacacacacacacacacacacacacacacactcacacacacacacacagaacaagcatgtgtctcaccccgcccccccaggctcacactctccctatcctttcactccaaggtctgcaagaagaactttccgtggaaggtcagtggctttgatagagtttctttatttagaacattctttttcgctgatgctcattccattaccttcaagtgtgcggaagtggagcccattagaagaatgggcagtcaggagacttccaaacgtgctcagagcgctgctgagccagggctcactcagccactgcagtttatttcatcgacagcctctccccccctgccctccccccccaccccctacgccccccctctctaagtgactcccaaattcccctgctttgcagctgccaacctgcttatagggaaaggaaactttgctttcagtgccacctttagcatccattcttgtctctgttcttccaactccagacctacttcttcccacgaccctcatctgacctttgatactcacatccagacctgtgactggcccaggcagaagtgcgaacacacagcaccttgtcagtggtcctggtgctgaggtttcacaggcctgctctgactcttggcttgtgacttgggtgccattggttcatctgggtagccaggctctgagagtccgagacagccactcctttctgcattgcctattttgtttgtttgtttttgttttttctcttccagctgtggcttctgtcttctctccatcaattaaagtcctgctggggtgctgattttgtatctcttgcagagttgaggtgatgatgttcacagcatgagtgcaggtgtgcttacactaaaaagtgcaagttatgggagtggcacagacgagaaacatctattcagggctcctactgacactgtgagggcctgtgtcagcaggctggggcagggagagggagaacaggctccatgcctctctccaaaacaatggatcaacacttatcaaaacagaaaatacagtgtaattatcccagagcaaggaattctacctctaggaatttagccaggaggagaacaaagacccacatgtctttgttgcaacagtgttaatgacatagcagaaactggaagccatctaaatgttctgcttccaatgagtggattgctgccccagtagcgagtagatgtctctgtagtgagcccctggacagctatgagctgatggcaagcaatttccagggaagcagtttttgggtttttgttgttgttttaaaaagtacagtgtgtgtgtgtgtgtgtgtgtgtgtgtgtgtgtgtgtgtgtgtgtgtgtgtgcacgcctgtgcttccaagcacgtgtgagtgcatcctaagattatttctggaaacaactaaaaaataggcagaaaagcagacaatgtttccagggagggggacccagggtggaaagactgctttaaattgtgtgcccttgtacactgcaacttttatcatgaggatatacatggtgcaaacaaaatttagagatggagaaagagggttaagcaggcctggtgggctggtgtgtgcctgtaatctcaacacccatgaggtggaggctggaggactgagagttcaaggccaacttgggctacattttggagactctgtgtcacaaacaaaccaatattaaaaaggaaagggaaagcgtggacattatttctgttccgattactcccgatttatttctagaacattcgtgtgatatagatagctgctctgaccgtgacctctgaagaatggaaatccaccacagatggtgcccctgaatgtgactccaaaagtttcccgtgggtttaaggccaggaaaagcagtcatggaaacttgctgtagcctccagcacccctcctcaggctcctggctgatgtctcttcaggactgtgctccatgctgcagcattttcatgcaccgggctctgccttcgccttcctccttcctcacagccagcatggtagccaggccaccagggcatcctaacaaacgcttgtccacttgtgtccattctccacgcagctgccagagtgagctatctaaatcataagcaattccggttcagggcttaagtcctgaccaagatgggcatagtagcacgtgcctatgatggtatgactggactgatggcagcagggcgatctttaggactgaggccagcctgggctacaaaggcaattcagatggggatgctagggcttgcttgggaagtggagacggggggggggggcaagagttgaaaggcatctttgataagttagtgagttaggagacagcctgagctacatgagcaactacttggaagaaaggaaagaaggaaggaaggaggcagaaaggaaagaagagagagttcaacccgtacatcattgctgttagaataaaacccaaacctagtgccgtgaccaggatgcaaggcctgaccctgacccacttctctttcaggcccctgctgcctgccacacttgtctgctccaaccatcttagtcctcttcctgttccagagatgccaagccagtccctgcccctcagtctttgcattccctgttccctggagctgagtgcctcttcatggttctcatgactgtacctcaccatccggtttcagggaagcctccctggctactttggtacaaaggataccccttccctaaatctagctacctctctgcaccccctactccccagaccccattttcttcatggtaattgtcactttcagcagctccttggttgacttactggaattcccatctctttccacagaatgtcggtgctggaggtacaggagcactgttgcgttaatctttcctgtgcttcagggccctgacctttgcctagagaggatgtcactggcatgggtggtaacaccatggagcactcagcagtgctccatgtcagcagaatctcagctacttacttgtgtatgtccggggagaagccccatgttctggagctggtaaacagggcaagctgcggtagcaatagcagttttgtgacaaagtctgttattgtaaagttttgcagaagtgcgtcttctggctttccagcgggggccgtcttctgcccaccttcctgttctgggaagcaacacatgttcttggggaagactctccctggagagagggttggccaggaaaattagcccagggcctgggaagggggagggaaagatggagaggatgggaagggatgctttcgggagaggtgacctgtctccagaaagaggtgaaaaactgtgtcagagaagacagacatcagggacgttggtgcaggtcctatgcccagactctcagagggcacaaatgcatggtccccgtgatcacaccacagagggcacacatggatagtccccatgatcacaccatagagggcacaaatgcatggtccccatgatcacaccatagagggcatacatggatggtcaccatggaccacaccatagagggcacaaatgcatagtcccattatcacaccatagagggaatacatggatggtccccatgatcacaccatagagggcacaaatgatggtccccatgatcacaccatagagggcacaaatgcatagtccccatgaccacaccatagagggcacacatggatggtccccatgatcacaccatagagggcataaatgggctttgtccatttccaatggaacaggtcagactacctcagaatgcattctttccctcgtttacctcccataacaacccttcaggataattccgtgacacacaaacacacacacacacacacacacacacacacacacacacacacacaccctttcctccctgcctgtgacaagctctagctatgttaccaagatggtcttgaacttcaggctcaaacaaccctttcccctcagcttcccaagtagctgacactataggtatgtgcctgcttgcccagcttgggcaaatactcttgtcatgcccttctggttgaggaaacctgggtaccgggagggatcttgccaagatctcactcagctacagaacttggatgcaagcatagtcaggtttttctgctataatttcaaggtttctagaaccttcccaggattgtttattttgattagccctaacctgtttccttgtggttaccaaaaataaaacaaccacaaagaaaagagatggtgttgcaggtaggttgggggacaatgggataggaagaagtagggctactgatgtctgtgagggaatctaagatgggagggacctgcagggctctgaaacccaacggtggagggcctgggtctagagacctcagctctgggggagggactcaacaggagcagaagggagccatcttcccaagcaggttcctgaagggcagggactatcctcaccctgggcttggggcctggcttcaattcctgattgatggaggaggtccttctgcatatatgtttgtcttttttttgttttttttcaacaacagtgtgtgggtcctgatatcatgaccggacacagccatggagataatagaagggcagggctgcagccccaggctgttctacttcagagcccaccctcactatgttattttattttattgctgtagattagttctttttcctattttttatttaaagtctttaattactactcatatttacatatccatcccccccagtccctccccctcccatcctctcatttcctatggagggttactattgcagcccagatacagcaaggagtgcctaggccctcccccaaacgatgtgaaggtctctggtggaggaattgggggatgggttgggggggttggtggggaatatatgtttgtcttattggttgataaataaagtactgttggccaatagggaagcaagttaggtgggactaagagtccaggaggattctgggaaatgtagtaaaaaagaggagtctcgatgtgagcttggcaagagaggatgcatgccaccggcatcctcgatcagataagtctttataaaatatataggttaatgcttatggttgataattaagactgagctagcagataagaaatcctaatcagtggtcagcagcattgtacctaatattaatctctgtgtgttattttgggcaaccacatggcagcggagctcgggtggctggtggaaagatttattgttacaaaacctgatcttccaactgcaggacaagtccagcctgcagggtttcctagaaagtcaaacaccctgagtggaagcaacagatgcaggggcttctgacttaggacagacttgaagccacttccccagggtgtcaggttgggggaccagactcttgcccttcccctggggtggtggtggtgacaacattcccttgaaggatgcttgtagcctcatcaccaccccgccaccccgcctaatccactgaagtaagagcactgggaatgaagtgtctcgttagagatgacatgaaatctctatgtcttcctcaaaaagcgtgagtctgacctgcatagtgtggcacacagctttagtcccggcagatctcggcaagttcgagtccagccggtccgacacagtgagacacagtcgggaaggagaggtgatgtgcagagtgagtgaatatgctttaggagttgaggacacaggaacaaacacgaattgaaggaccagagaagcaccccatccaggctgggcgctgggcctgcaggcaggtggtaggatatggccgaggtgggctgggttacagaggtggagaggtaagagctgggtgtagttcattaggctccggcatttgcacctctgcatggagagtacctgtgctttgaaactggatgaagacagtattgtcaggcctggtgctctgggaaaggccccctggggtgtccatcacccccttcctccccatccatctcccccctccctttacccactcctagctcacaccccttcctaacccccgcccccaccccgttaaagttccagagtggccacccacagagcagctcaggctgggtgttgagtcataagaccacagtgcctgcccggggttgagggtgacagatggctctatgagggcatgagtggagtggggtgggagagaggcagatggaggagggcagtggccttggacccagcagggattcaaaaaggtgaccaagggggagatagacca

SEQ ID NO: 38 - DNA, 45993 bp, Cricetulus griseus
  >scaffold_41 dna:scaffold scaffold:CHOK1GS_HDv1:scaffold_41:12017975:12063967:1
gcacttaggaagcataggcagacggatctctatgagtccgagaccagcctgtcctacaaggcaagttccgggatagtcagagttacaaggtgagaccctgtctcaaaaacaaaacaaaacaaaagtgcccgaacgaacccactacgtccatgtgcattgggatacttatgtccatacgtctgtgacacttttagccgtcagccaaacgcgaatcaagtttttgtataagggaatctgggcgcaagcctgtgacagcaacactcgggaagctgaagcaggcaacaggctagaatatcgggaaacggctccccgttgcaaaaaaccctgtaaacgggacaaggcgccgcaaccccggccgcagccactcacctgtgcccggggccgtgacgtaagtgcgccgcgggttcgccagcaccttgccgtcgcgcaccacgcccacgccgatcttgttggcgctgccttcgaaccccagcaccgcgggcatggtgcaccccggctcgggatctgcggatggcaggactagtcgtaaccggcagtaccacgaacagcccagaaccaagcgatgggaccttcaggcgccctaagtgacgtcatgaggtgccaggtggaccaatcacagcactcctgatccacgtggggggaggggcgacctcggatcacgtgaccacaccaagctcccacgtgggaacaggctccattctttgtgctgtgagcggcttcctggcttcgttggtaggtccggtagcttgtgctagctggttcggcggccctgctcgcagaagggcctaacgggggcgaggagctgcggggctgggatgcacgtggcgaggaaggctgggtgaaccgattgcacccccctcccccggtgtgcgagcgcctgatttcgccgtttcttatctgtaggcaacgctgtaaacactgcttcggtgctccaggcgcctaagggctttcgtcacagggatgccaaagcgtgggaagagagcggcggcagaagacgggaaagaacccaagtctggtaagcaggtgaaagtagcgcgtgggttaccccacctccaaatttaggactctactagaccaccatgagctacgctaaatatggaccacgttacattgcgggagtccgagaagttagggtaactagagcgcctcgtggggttggaaaccgctagctcttactttactcattttatagagccagagaccaagaagagtaaaggagcagcaaagaaaaacgagaaagaggctgcaggagagggccctttcctgtatgaggacgctccagataataaaacgtcacccggtggcaaacttgccacactcaagatatgctcctggaacgtggatgggcttcgagcctggattaagaagaaaggtttagatgtgagtacaattcaggagggaagtagattttccttgacagcctaaagaattatcttggagttggggctgtagtggcgcacgccttgaatcccagcagaggcaggcggatctctgtgagttcctgggccagcctggtctacagtgcaagttccaggacagccaggactatacagaaaccctgtctcgataaaacaaaaacgtgtttactgtgagcccagaggatgttattttttttcttgcctgtagttggggctgggagcaagaaatgtcccttcgatcccaatcaccttgtctcatattctttttaactattcgctggaattttgtttttttttaaatcccaataactactaaagatctcagtgggggaggggctggagcacttcgctctgcttcggaattaggtttctagtacccaagtcaaatggctcagtccattcacataccctaaaagtccctttgtcattcacatggtttacatataccctgctgcttgaattccttatgtactgggatccagtgtgtatactatgtagcacataagatttttcttaacttttcacgtttcattagtgggtaaaggaagaagcaccagatatcttgtgcctccaagaaaccaaatgctcagagaacaaactccctgcagaacttcaagacctgcctggactcacccatcagtactggtctgctccatcagacaaagaaggatatagtggcgtgggcttactttcccgccagtgccctctcaaagtctcttatggcattggtgagactattgatttttatgtctgagtgttcttcagcaagttaactctgctgcttagattttttttttttttaaattttatgctggatttcatttctgtaggtgaggaagagcatgatcaagaaggccgggtgattgtggcagaatttgactcctttgtcctggtaacagcctacgttcccaatgcaggcaggggtctggtaaggctggagtaccgacagcgttgggataaagccttttgcaagtttctgaaggacttagcttcccgaaagcctcttgtgctatgtggggatctcaatgtggctcatgaagaaattgaccttcgtaaccccaaaggaaacaagaagaatgctggctttactccccaggagcgccagggctttggggagttgctacaggctgtaccacttactgacagcttccggcacctctaccccaacaccccctatgcctataccttttggacttacatgatgaatgctcgggctaagaatgtcggatggcgccttgattactttttgttgtcacactcccttttgtcttccttgtgtgacagcaagatccgctccaaagctcttggcagtgatcactgtcccatcaccctttacctagcactgtgacacccctgctgaagtaacttacacctgggaaatagcctcctctcaagtccagtgtcctttaggccccggggttttgattttttgtgtaccccctgttttaaatgttaaaccaagcttctggcttccaagtaaaaataaaaatgccctactttcagctttgttatctttgttttccccttgtgaatctacacgttcccttttttattttttcatacacaacagttgttaaatgggaaaggttagagtcatgacattatttatttacaagcacagatgaattcctaacctctcccgagacagcgaccctaccttaacccagttcagtgctgcaactggaagtaaggaaactcggaaggaggaattcaggggaatacaggattaggggaccatatcccatattaaatagttctatatacatcagttctgtagttctgtacagagcagtggctgaccccaccccacaggacaagaaatgtgggagaaagggactcagggtattgaggccagagccagcccctggtgaagtgcaatagcagcagcaaggaaggtcctaatggtgcacatgagggaggggacacccccccacacacacttcccacccccaccctgccctggaatgtgtaagggtcaggaatggttctcagggagcacacataggaaggacatggctagaaccatctttaggatccaggcctaggggcaatgttttgcctatgtatcctaaacagcaacccttggaagaaagcagacagctagcaatggtcttacctacgcttccaaacctaagtaagggactggttccttcctacctctccccaggggaaagggaggcagctgcttggcttccttgcagaagtccagagagccttttgtagtgttactgttgctaccaggcagccaccaggcacagactggatcaaggggctcaggagaagttctggacaggatggctgaccttcatacagccccaataaagggcccggcccaaacatagaacagccaacaaaatgacaaatgcccaggctgcgtagatacctccatattgctgtgcatgcttccatgtgccaaactgacagacgaggaagaagaaaaaaaagaggttactcttggtgtccactgcttcaaagtcttagaaagagtaataaaatgccaacttgtctctgttccctagtcacttgtaaccaccttcagggacctttccaaaggtcaggtggtttagcttccttctcttaagcaggaaaatactcctgccatcccagacatccgccactatttctcacatctaaggagtgaactaggattcctaataacaactcagttttctctccagagtgggatttccttctttgacttcttagtttattagtcacctttaacttcattttatgagtacctgaaaatgctccccaaccttatcaccaagctgtagttgacaatgaccttgaaatttgatcctccggggtgctgggacatacgattgcatcaccatgctttgtttgcatggtgctgaggtcaaacgcagggctttgtgcatgctaggtcaacactttggcacatctggaaagggtgacaatctactccccacctttgtattatagatgggcctggctatatagccagggttaccttagaactgcctctattcttggtttcaagaacataccccaacacccagctctttcaccattctttaagctatcaacttcttagatcttagcctgttgatgaggcagataaaaggtctgcatcaagactactcacagcaaggccagtggcagtgactgccaagagtaaaccaagcaagaagcagcagatacatctcttccgaggatatctgcgcccaatagatgacctgtgggagccaacagaatggatatttggaatagccctgttgattttatgccatatattatccagctagcagtgcaatgcctaaccacttacactttcctgcagtgagggcaccgtgccaaggttcggtctgtgaattctgtccactatgaaaaaagagaaacaaccatagaaagaaagttctcctcaatgagaaccctgaggcaagggggagtatgacaaatgagaattaggacagtcttttccataatttattactattcccagtacttacctccccctcccccaagggcctcccaatatctctcctcaccagaaacgtattcttgcaatgtccacagatgaccctgacacccattggctgtggctctggacttagaggtcctggatgcacaggccctaggttgatgattcttttgctatatgggggggaaagttcttaattttaacaggatctgctgacacagagtatcccagcacttgggaggtataggcaggactacttaggaattcaaggtgtgccagagatcttccagtctccacctcccaggtgctgggattgattataagcatgcaccaccttgcccaggttcaggtttggttttgtttctttacagttttgcccaagcacagccttcccaccttatgtctcttaccagtacggccgtgggcaagcaatccgctgggaagtcaccttgcagataaggagacaattacaggggcatcggacatacttctttcctgggggtgcattcttgatgggctagggaacaacgaataaaagaacaatgggtatatcagcaggcaagccggtcatcccaatcctctccaagaacattactgagaaagaaaagtcagacatttgagagatacaaatgttgccaacatagcaggctacatctgtgatctcatcactcaggaggctgaggcaggaagactgcagagcctgaggtgagcccagatcgcttgtgagactgtctcaaaagaacaaacacgagagccccaaaatacaacaatcaaaagcaactacaacaattgccagtgaaaactacacttcaggatccaggaaaagtgtgaaagtgagagctggtgaccattatctctggtgaaaggcttctgaagcaatggctggtgaagatccaggaactgaaagtgggtttcatgaagaggtcttgaacagggtctagaatcggaaagaggatgcaggaaacaaggcccgttttttttgcagataggtataactcacagtggcttcgttgcagacaccacatttgaccacatgctgatgcatcttgccttccacgttgatcggagactgacagactcgacaggtaatcatgggggcactcccactatccgggctagtcaggggtgagtaggggggtgggtcctctccaggcaacaccgctggatgcccctcagggaacgggggaaatgctgaagaggaagcagataaaaccagatcatcattcggacacttgccacggatgctccacggaagcggagaaccctcctgacaaagctcgacgtgcttatcatcagcagtagcggtcagaacgtcttcctcagaacccctttcgtgccaggctcaggcagtgattgcggaggaagggtgcctcgccccgcgacaggtgccatggtgccgcacctggcgccggagcaggctccgccccccgacccgatccgcccctaggccctggtgcacctcagaccgccggcttaccctggggcggggcatgtttaccggctccgtacggaggtgcggagggcgtcaggcctccaccgggcccggtcgcgctcccgcccgggcccgctaagccgttgccgccagcgccgccatcgccgggctcggacagcagcggggagcgctctccgtccgccgccatggcgcctcccgctcagtcagcgaccagctgccaccgccgccgccgccgccgccgccgccgccgccgctaccgggtccccacggcgcctgcgcgccgcgttcgcccgcagccagtgccgccccgccccgccccgctcacgtgacaggctggcccagcccctcggcgctgtcattcgcggaggtaaaatagttcccggtttgtgagggagccttccttctccattggacggcgacgtgtcgcgtcactgtcacatgaccttcccgtagctgctgagtccgtaaacactgcacgtgactagaagttgtgcgagccattggaagtgccaccatcgcgctacctccggcccaggtgggcggctgctccacgcgagtcacgtgcccggcctgtcgcgtgcagccgctcctcattggtccgaagtctcccctgggacgccaatcaattggcccaaacttagcgccacaaacgagagggcggcttcaatccctccagagagccaggctgggtgtcctgacgtgaggtgggtcgcgggaaacgccctaagtcctgggcaagctttggaaagccacggggaggcgaggggcctggcacaaggcccccgagttcagcccccagctccgcagaaaattggtgactgtaaatgcatggaaggatgagttaggaagccagggggttccaggcccgcctcggaagcagcgtgatatcctggacaaaacaaggtgaacacaagtgggcggggcactggacaggtgtcttactacttaacagcactgaactgctaagtcaaaggagtctagtttggttccccaaactcctagggcagtagctacctgtaactccagctccaggggacccggtgccaatttatggcttatgtaggcacccagcaaccagacaaatgtggcttatgtgagtgtgcgagtacacctacataaaaataaagccacccaaaatttaaaaacagcaggtcacagtgtaggactgtaaccccaaaattgggaagattcggacaggaggatcagacattcaggtttgaccagaagtttgaggccagcctaagccacagggagactgccccaaaacttagtatggtgaacgaccatactggttagcgcagcatcaatactcttggacctgaggctggctaaggcaagggtatcatgggtttgaggccaatctgacacacaaatgagtgatgatgtgcctggtagtacaggctggtgatggtatctggtgagctgagtggggactatgctgaaagccctaggctccctttcagtacctaaaaacatgtaataataactaggtttttttttttttaggtggaaattggactccgggcagagtgctatactgccactgctacatacccagtcctttttcagttttaaggcaaggtcctggcttggaacttggtgattccgccaaggcctcctgggtaattgagattgcaggcatttgccattatgcatagctgtgaaattataatattatttctacaaatgcctctaccaggattcaagttggaacctgcttgaaagcctcttgtgagagctagaggattagctctcatagcatctcagggtgctatgcaagctgccaaggaagagaagcaattaaaaactctattcagctgtaaagcctacaaacgaaaatgaccagcacagcaagattgggtgcaatagtggcacttttatctcaagggtaaccaacagccacctaatggacttcaggcctagaatcgtgtggtagtgtcaacctactgctgccctcctaaaccagagtgattcccaacagcaatataaataatacctatccatatggccacaaatacatgtttctgtctctctctctctctccctctctctctctctctctctctctctctcttatacacacacacacacacacacaccattaaagaagcttcatctgtagcagatgaaggccaccacagtgatccacaactgaccaaaatgcaaaggacacctgactggtatggtgtccctacagttgatacatctgcaacacaacccttatatctaagactcagggaacattttgaaagggtgggcagaaagatggtaagaatgaggggaccaggatgcctggtgtacagtgttgtcttggtatatgacagggatctgcacccataaaatcttaacagttactgcctaaataagacctgcacaatgccagttgacagccagacatggatgggaatctcacaaggcccaaccttgagatgaagagctactgggaagcaatagcagctaagagaaagacaatcagtcttttccagggatgagccctctgatagattagccttctaatctccagtggttattggtaaacacgtacactgatgagcaacagtaaatcaattcagtgggttgtatttatatatagatacaagtgtgtgtgtgtgtgtgtgtgtgtgtgtgtgtgtgtaacaataataaagaagatgaggtcgtgaaggtgagaggagttgtttaagtactcaaaatgtttttttttaattacccacaaaataatttttaaaaatgtctccactactgaaatgaaaattatatttttatgagtgtgtccactgatggaagaagagcttatcattttactagatttatactgacccctcaaatacatacacaagtgtttattgattcacgtagtaaatcaaatccaaaggtatttagtcatatttagtagataggcatctctaattgcttatgttttgtcttcggtcaagaaattgagtggaggttattttttagttttgatcttcatttccatttttaaactagggtcttattcttgaactaggctgattttcaattcatggcaagcctcacctctccccaaaggcctgagccaccattcctgacttggtcctgatatttttagacattttcccaggtcagtttctaccatcagttaggtcctcaaacaataatcccaatcgctccccagcacacttaaagaaataatgagtccccagacacaaagttagaaagtggttatagctcttcaaggaataggccagtgtgctgctcttgctgatgatttgccacgaacattctcaagtattgactctgacttcagggtaggtttctaaggggggaagtgcttctgtgtatgtctttgtcttatcggatgataaataaaatactgtttggccaatgaggcagcaagttaggcaggactaagagtcaaggaggattctgggaaatgtagtaataaagtgatgatccaggcaggaagtgacatagcagggagactcatatataggacaagaaggaagtggtctcctctcttcctcctggtctctgctctggagtccatgtgatccgctggcaagagagggcaccagcgcaaggcatcctcaataagtcttataaaaatatagatttatgataattaagactgagctagcagatgagaaatcctagtcattggccaagcagcatttgaacctaatataagtctctgtgtgttacttgggatcttaacatggcggtgggcggaactcgggcagcctggcagaaaggacccatgtggcagcagggcttgggtggttagaagaaagacttgttacagatttcattatttgggccctggtaatgtaaaaaactccaatccacccttttgtgatccctccatcctcactaaagttgtagtttgtgatcacttaaatatagttctagctatgcaaaaaaagtgaaaaacaactggggctatagctcagtggtagagcacttgccaagcatgcattatgccttggatttcatctctagcatgccccccccaaaaaaaaacaaagtggaaaaaagagtctatttcatactctttgaagggttgaagtagaaaaaaatgagtataatggtttatgtattaactattcattcatttttcatttggcctgtaggtgatgtttttattataggttaaatatagggatgtatgactagaaataaagtgaagtaaatgttagccaataggttggatattttctgacgttatgtgaagtattagaggacatacatgatgagtgaattcctcagtatgcatttttacatctttttgtactgtgttttgagacaggatctctctatgtgacccaggctaccatatggcccaggctctactgaaactgatgattctgctgcttcagctttctgaatgctgtgattacaggctggtttagatacagacactgcctccttatctttctttaaactaacctttgcctatgcagctgtgggaaaggttcagaaaagaatggctctgtaagtattatgacaaaactgttgtgtaaaaaaaaaaaagtttgggaagttttttccttttttaaaattattttttattgattatttggtagtctcacattatgcaccccaattacactgaccttccagtcttcccatgccccttgtgatctccccacaaaaaagtacattttgtgttgtatatatatatattcacttgagcatggtgaaattcctagtgaccagtgcccaaggaaagatgaatctttctcttcctgtcatgccagaaactatcaattgagaccccttcggtaggagccagggccagctctcccaacaccattgccactgcctgtaccacagtgtaggaccaagagatgggtggaaccatctcttccaagcagtggggcattaatatggtttcaggcagtaacctagaaaacagaccaccccatgggctttggtgataaccctggctgcagacatctaatggggaatgtactgtggtatgttcatcttattgattattgaataaagtactgtttggccaatgaggcagcaagttagacaggactaggagtcaaagaggattctgggaaatgtagtagagaagtggtgatccaggcaggaagtgacatagcaaggagactcatatttaagcaaggacaagcaggaagtgagccctttttccccttctcacttcctccagagtcacgatgtgatccactggcaagggaggacgccaatggaaggcatctaagtcttataaaatatatagatttatgataattaagactgagctaacagatgagaatcctagtcattggccaagcagcatttgtacataatataagtctctgtgcattaatttgggccctaactcggtgggtagaactcaggtggctggcagagactgcccacgtggcagtagggctcgggtggcttttggcggaaagatttatcataacagacatcaatatggcccttggctatatcaggaccactgaccccttaatggccctcagcagttgcacagggcacaagccgagacatgacatcaggtggttggacatgctgctcacatcagtatagcaccccaaagcagcaaagcctgaagatatcaccaaggtctcaggcagtatcacaaacagtctatgagcatatggatctcagacttcattgggacctggggtactagcatggaccacagacaccaacatggcctctggtggcatgttggtggtccttgaaggaccacagaggtccttcaaggaggtctaatccagaatgtgaccgttcctcatctcaggcctctgttgttgccaagagctgggaggatactgaggccaggttcagtggctgagtctgcaactgatgagttccaggctgttgtataccaccatgccaaccctactggggaatgacaacactgccatcgccatcacatctccaattccacctctctccatactgcacacacacctctccatcacatatttcccccttttttttttatttatgagacagggtttctctgtattgttttagaggatgtcctgtaactcactctgtagaccaggctggtctcaaactcacagaaatctgcctgcctctgcctcctaagtggtgggattaaaggcatttgccaccaacgcccagctacatatttgctttttgtagtgttgcccactgccaggggtgggacttggctgccttctgccgctaccctgggccacatgacccaaatcttttctgttttgaaaaagattattttaaaagttatattcatctattgatttgtttgtttttgagacatggtcttgctttgtagccatggctggcctggagctcacagatactcacctgcatctgtctcccagtcagcggaatcaaaggcatgtaccaccactatatttagcacacacacagttgcactctacagagagtgtgtgtgtgagtttatgtgcaccaactgtaagcaggagcctgctgaggtcagaagaggtagttggaatcccttgaactgtgttacaggcatctgtgaggtgctgtgtaaatgctgcaagaacagtaagcattctttactgctgagccatctctccagccccttctgtaaaccttgattgccaaaactttcttggatggagccactacctagtctgaagatggagtaatcactcactacctgttttaaataatacatgcagagggagggatctctattagtcaggcctttattattgccaccacccagagagggagaagctgggatgggatatcaaatagcaactcagagaaaatgaagtcccttgctttgatagacattagaagggagaagtctctgaaactataggagaggagttctgaatttaacagattggggaagatactaagctggacaggtcacaatttaggaagttaatcctgttgtttcaccataccttggagctactatgacagcaatttaggtgtggctgatcctttgtagagaggtgtctgtgttctaatagtgcctacagttctgtgcagagccctgtaggagaatccagatcactaaagtctatctttccttcaagtgacagtatagtttgatagtgattagaaattacacacccagaaaacaaggtaacttatgagaaaggccataaaagttgcagaaaacatatcaacatgaaggaataatagttctggtcttcagatagatagacagatagatagatagatagatagatagatagatagatagatagatagatagattaaatagatggatgtatgaatgacagacagataggtgacacacacatatattttaatttgtatgggtgttttgcttgcatgtctgtctatgcatcactttcctgcctagtgcctacagaagccagcagagggcatcagatctcctgtaactggattacagatggttgtgagtcaccatataggtgttgggaattgaacccaactcctttggatgggtatccagtgccttaactactgaactacctctccagctctgttcttttggtctttagtccaaagacttttggtgcatgacagacaacatccaaacagtggcatggtctcctgattctctcatgttctctgagtggttcttttaatatatcgtttggacttcctcatgaacacacgctcaggagattactggaaacagctcattggccagagatggcctcactcacatagatgataatttggagaatcagattggcctagcttctatggagtgtagtgctgctgcagtgcaaaagcaataaaagagaagttactaatcatctttaggctagggcacagcactaccacgattatttctttactatattctagtgttcatagtaaaccatggaacctgtctatattcagtgtgatatactagacccccactcactccctatttttttgaggtggagtcttactatggtaggctagactggtgttgaactcttggggattcttctgtcttgctttctctggtgctgggatcataggtatgcaccaccatatttggataggcttaacttattgatgaaagccactataatttttttttattctttcatcccctttctggccctcttcttatttctcctttcctttctttcctttatcttagttagggtgtctatcactgtgaagagacaccataaccatagcaacttttttttttttttttttttttggttttttgggacagggaaccatagcaactcgtataaaggaaaacatttaattggggtggcttacagttcagaggtttggtccattgtcatcatggtgagacatgatggtgtgcaagcagacatggtgctggagctgagagtcttacatcttggtaggcaggcaacaggaagtggtctgtctcacttggcgtggcttgagcatatatgagaccccaaagcccgcctccacagtgacacacttcctccaacaagaccgcacctactctgacaaagccacacctcctaatattgccactccctttaggggccattttctttcaaaccacacctttccttcttttctccccttaccttgtcccactcctccccttttctgtttccctaaagatcaactttatggcatgcatgctaagcaactgctgtatagtgctataaccccactaccaccttaattccagtgggtatgttttccaatgtgttcatctatcaacacctctacagaaatttaatgaacatctactctttgtgaaggacatcccttgagaaacttatactcagggtagaggaacaaaataatgtaaacattgacagataaaatgtcaacactagtaatcttttattgtgtgaaaaaaaattaatgctagaaagttgaatatgcttcataataaataccaatgtaactcaagtataagaaaagaggaggtgtcatacacaaagctatgggttcaatccccagcactacataaattgggtatggtgacacacttcctccagcaaggctacacaatgccacacctcctaattcttctaatcctttcaaacagttctgttcgctggtgacaaagtcttcaaatatatgagcctatgggaaccatttttttaaaagattcatttatttattatgtatatggtgttctgtctgtgtgtatccttgcaggccagaagagggaaccagatctcattacagatggttgtaagccgtcatgtggttgctgggaattggacccaggacctctacaagaccagctagtgttcttaaccactgagccatctcttcagcccctaatttgtttgtgttttgtttgtttggtttttgtttgtttttgagacagggtttctctgtgtagtcttggctgtcctggaactttctctgtagaccagtctggcctctaactcacagaaaaccacttgcttctgcctcctgagtactgggattaatggcgtgcaccaccacagtttttttgttttgttttgttttgtttttccggggtgggggagtcgtgggcattcttattcaaaccaccacatgaagtatggctgattccctcaatggaagtagcctctgtgagctaacagttcctcccaccttgtgatgttatttatcttaattactgctttaaaagtattctcctggtggtacagaccatacttgaaaggcccaggcagtcagatgcaattctaaagcagcttgggtaatttagtggaactgtcttaaaacgaaaagggcatggggatatagttcaatagatgagtgcttgcccagcacatatgagatgttaggttcagtcttcactaaggggggttgagggtgagagagaaagaggagattggggtggcagtgagaatggggaggagtcattctctaatacaggattaaaagtggcttcagtcaaaggggttaagaccaagctggtgaaacccacagaaacagctgacctgaacatggtccccagactgttagctgggaaaccaacataggactaatctggaacccatgaacataggtgtcagtgaggaggcctcagaaatctctggggcatcttgtagtagatcagtacttatccctagcataggaatggactttgggagcccatttcacatagagggatacttcctcagcctagatacacggggggagggcctagggcctatcccaaaggatatgacagactctgaagattccccatggaagggctctccctccctgaggagcagaaagggtatgggatggggacttgggggggggggcaggaggggagggagaaagaactgggattgacaagtaaaacaatcttgtttctaatttaaataaaaaacagaggggggaaatggcttcagtatataaatttgcttatgaaaggaaagataaagtaaaaaatgataaatttagcaggaaggtataagaagagaaactgtaaatacttagaaacattttcttcacattgccaacaagtagtaactagtatatggcttgcacaggcagagcagtggtagcatttgtctggcttctatcactcaaagtattccaattttattaatatttttaacttttagatttattttaggtttatgagtgttttcctcttgtgtatgtctgtgaaccttgtaaattcctggtgccagaggagatcagaatagggcaccaggtccctgggaactggagttgcagatggttgtgagctacaatatggttgctaggaaccaaagctggctcctcagcaagagcaacaagtgctcttaacagctgagcatctctccaaccctgtgctctcctctttttcttctcctctgagttgctggtttttcatctgcacttgcagactaaaggaagcttttgaggagctagaggaaagcagtggttaagagcagggtgtgtaatgttcttgcagaggacccagatttgtttctgtgtacccacatcaggtagctaacaactgcctgcaactccagctccaggggatccaacacctctggtttctataagcacccgcactggtgtccactccctccacacaaacatatacacatatttaaacttaaagtatgattgttttggagacagagtctctctgtgtagccctggctgtcctggaattctgtgaagatcaggctggccttagagatcctcctgcctctgcctctggggtgtttggatttagggcatgtgctcccatacccagcataaaataaatatttaaaacacatatattttcattatatgcagagtgaattagtccagatggcagggttgagcagggtggagtagaggtgggtacttctctgggctttcgctcccttgtgtttcatgtcttccatgaggcccagttctttttatttaggaagtagtcagcctccctctctggagccattctttggggttgaagctgttatatgacttctttaagttattccaagccctcagggaggcacaaatggggaaatgaaaatgaaataaaagagcaaaagtgaaactttaaatgacaaaataccctagaacaatattttaatttcaataattggggaaatattggtggtagtgggtataaatatttctttttttatggtttttcaagatggggtttctctgtgtaacagtcctggctgtcctggaactcactttgtagactaggctggcctcaaactcactgagatccacctgcctctgcctccacttcccaagtccagaagtaaatatttcaaatggagaaaactctattttgtgatctagagagaatgagaaataacagttgagtgtgagtatcaagcaggctttctacctcaagaatctggagactttttacctccagcctatttatagctaagaatgacctcgaatttttgaaccttctatctttatgttccaagtcctgagcttacagacatggaccaccatacccagctttgtgtggtgctagacagatactctatcaatgagttacagcccagctcttgagattcttctgcaagaagtctgcttggttttttgagacagggtctttctgtataacagctctggctggtctcaaccttagagatcctcctgcctctgcctcctaagtgctgagattaaaagtgtgcagtgctgggcgttggtggcccacgcctttaatcccagcacttgggaggcagaggcaggtggatctctgtgagcctggtctacaagagctagttccaggacagtctccaaaaccacagagaatccctgtctcgaaaaaccaaaaaaaaaaaaaaaaaaaaaattgtgcagcatcagggctagagagatggctcagtgattaagagctcttccagagggcctgggttccattcctggcaaccacatggtgactcacaaccatctgtaatgagatctggtgccgtcttctggcctgaaggcatatatgcaaatggaatgctgtacacataataaataaataaatctttaagaaagtgagcaccaccactcatgactatattattaaatgttaataaccacatgggactattctgagtattgtgggattctagatggtgctgatagactaaatgaaccattaatttttctttgatccgatttaaagttaggtggatattaaaaggctaaaaagagacagtgggaagtagtaacagccaacatttactgtgtgtataattatagttataattataattatagtgccagatatttattaaaacacttaaccatattttatatgatcctcgcaagagtagcaaataaattaatcattttccagatgagaaaatttaggcacagaaattttattggggatggatgacatagttggtagacaaagggtagagaaagaactcatacataggtagtatgattacagagcctactcatttatattgtttaaaatcaggaatgagattatatcaaagtgattgggaccatgattctcaaactctgtgccatgatggagacccctgcaggtaccattaggtagtttaaaatatttatatattttatttatggttttttttttttttgttgttgttgttgttttgagacagggtttctctgtgtagctttggagcctgtcctggcactcgctctggagaccagactggcctcgaactcgcagagatctgcctgcctctgcctcccgagtgctggggaggctggcttatttatgtattttaaatttatattatttattaatttgagatggactctccctatgttgcccaagttggcctcaaacttctgggctcacatgatcgtttttgcctcagtctccccagtagatggaacttcggccagtgccaccattctgggtacacatacacactcacacatagcagtattgaagatggaatccaagacctaatgcatgctgggaaagcactctcctccccggcctccccaagacagggtttctctgtgtcacagtcctggctgtcctggcactcgctctggagaccaggctggcctccaagtctcagagatccacctgtctctgcctccctagtactggaattaaaggcgtgccccaccacacttggtcctaatgttcaaaaaaagactaatgatgataataacataaaccaatttaaatttaaaagagcactaaaatataaagtataaatagatattttcatggactttctttttctctttctttccacccgctatcccagccccagcagcacacactggcacaggctggcctcggtcattactaccactactattgagacaggatttcactatgagcagcccaagttgaccaggagctggtgcaatatctttgggattaaaggcgtgtgccaccacccctttggctttaataaatatttgtaagtacatgagaaaaataggattgggaagcagtgactcgagttgtggtggaaaaacatcaagcaggagagattaaactcccaggagaggggcagataagggatttcaagatctaagcatggttacagagaaggaataccgaaagcttaccacgggttgtactatttagttctggggtgtgtgtatataattctgttacgtaaattctctctcttcctctccctctctctgtgttttgcttgcttgtttggttttggttttttgtttgtttgtttttccgagaaaggttttatctgtgtaacagccctggctgttctggaactagacttagctggtttcgaattcacagtgatccatccccctgcctctgcctcctaagtgcgtgcgcccccaccacccggcgtgaattctcttaacaagtctcagggttagcggaattgcttggactcagtactgtgtgcatccatccggtccgtgcctaggagccaagcagcctagaactccgcgcaatctgggcctctatgtgtttccccaaatcctgtaggcaccaagtcagcactgttagctcgcgctgccttatttccctattccagaaagtaactcggacagcgttttgcttcgttttattctaggattgcacaatctatggtttgactattttttcgaattcttacacagtaacgcagcggagaatggaggtgcagatgggcggttccggggctctccaccctgcttcttcccacacaggcttgctttcctggctgggagacccatgaatgcgtgcggggacgaaatgctggatgccctagactcggagagggtccctttgacgagaactctggcgaggttccctgccacacctctggatgagggtgtgtcaccatggagacctgccgctgccattggctggcgcctggggctggggctataaagccgggcccagagagcagtgcactaacagtgttgaccagactcagacggtgtcgcccgcggagcggaaagggcaggatttcagcgcggccgtcggtgacaccatggagaaaaacgagtgagtgtcaggccccgggactcggacgttctgtcgagggggacgggctgtcgccgagacctgggaacttagcagtctgggcccagaaaaggagcgattcctctggggatgcagagaggcctggcacagagcccggtggcggactcacggctccggaacggcggggaagctagcgcggcagggcgggcgcgggaatccagctgtaggagcgccccggagcaggaaggaacaggtttagcgcagggtaggcgacccctttcaggaactgtggtgcttctgtggtgtgtcgggatgcttgtggaaaagcaggtacttcgtaacacaagtttccattctaggggtccgggtaacccaggagataagtctgttgtgctatcccgcagttcctcctttagaaggaaaattgctcactttccaagacagcctctgttctctccaaactagaggttgcattaacaagttgggaatggagtctctttagggctgggaaatctgtatttattgttctactcagaagacacccaccccttcctgtccactttaaggaaaaaaacaaaactcttgttttgcgtcgggaattcccagttaactcacaagcagactgtagggatcacagtagctttggaatgatcacactgagctgtggctggacatggctgattgccacgcgtcatttcttcccgccctttgggatgctgtttcattaatttcttgcttcattttgtcaccccgtgactctatccgtccccaccctacctagctgtttcatggagggtaacctgttgtgttgtagtcctgtttgtttccaataatatactcctgtgattgtgtgtcttgctatacttaaggtgggcttgttatcctatgtgggtctgtcatgaagctgggacttatgacgttggtggaagaaaaaaatttcagccgggtgttgatgttgcacgactttaatcccagcactcgggaggcagagacaggtagatctctgagttcgaggccagcctggtctacagaatgagtgctaagacaggctacaaagcaatacagagaaaccctgtctcaaaaacaaaaacaaaaacaaaaacaaaaaacttgttgaggctttttattagttgttctcaattcatgtgcaccacagttcttccatttccaggagcaatctttgatctttgcagttagttggttgtgatggaattggacttgggactgtttgaaggttctgggttgatttttttttttaaccctttggtttcttgagacagagcttctctgtgtaacagttctggctgtcctagaactcactatatagattatctctggctgtcctaggactcgatttctgaatcgggctggcctagaactccagagatctacctgcctctgtctcctgagtattggatgaaaggcatgtgccatcattcctggcttcttagcaagtttttaatctgaagggataggcccggatgtcaggataaattgtttacgatttttttttaaaaccactggaatcaaaatagcaaagcagccatactagttagccatagaagccaggcagtggtagcatacacctttaatcccaggactcaggaaacaaaggcagatggatctctctgagtttaaggccacccagggctacgggagattgaatcagtctaaaagagtaacaaagctcacgcctttgaacctagcatttgggatcgtacacccttaatcccagaagtagggaggtggagccaggaggatgtagctggtcagagaaaggactaaaaggaggaggagacaggatccgagagccttttgcctctgaggattcatggagacaggattggcatttcaacagggtagagttaagatctactggtttggctgctttgcttctcggattttcagtttaaaacttgaagcccagtatcagtctcttggtcttttatttttcatgttatacccagaaacaacttcttcttcttcttcttcttcttcttcttcttcttcttcttcttcttcttcttctttttttttttttttttttttttttttttttttttttttctttttttttttttttttggttttttgagacagggtttctctgtttagctttggagcctatcctggcactcgctctggagaccaggctggcctcgagctcacagagatccgcctgcctctgcctccgtagtgctgggattaaaggcatgcaccaccaacacccggccagaaacttctgtttttaaccagtgtctactgagaatccaacaacactagtttaggattttataaataatgatgtgaaataagcctggtttttcttttgttttgcaattgttaagtttcttagctgtgaatcatagctcacattgtctgtcatctcaatactccaaggtagagagagacaggaggatcaggagctcagggtcagcctgggctacatactgagtttcagactggcctaagttacatgagaccctgtctgaaaaacagcaaactttaccaaaaacagtttattttctggttttgagaaatacatactcattatagtctttgtttttgaaacagacctatgtggccctggctggcctggaactcattatataaaccagactggccttgaactcacagagatcctcttgcctctgccactccaatcatggaataaaaggtgtggaccacctggtcccgccattgagtatctttgttaattacaaatgacagaggtctgtacccaggaatcaaagaaacatgttcagaggaactgaagctcttatatagacttctactaggagtgttcttagtgcttattaataaataataaaaataagaagaagtcagggctggtgacatggtaggtaaggtaaggtactcactacaaagcctggtcaagttccatccttgggacctacatggtggaaggagagaaccaattcacaagttatcctatgaccagcacacacatgctgcaacatgctttgtatataccacagacacatacacaccgactaaattaaatttttaaattaaaaattaaatcaaaaaaatttttacccaaagagctgcctaaagttctagctactctagtaggctggctgagaaaatctcttgagcctgggggttggggattagtttaggcaatgtaggaaaattctgtctcaaacaaaaaaaaagcaaagcaaaaggcaagaaacttgccttcaggaaggccttaatccatgctgattcctctccttgatttgattactgcattgtaactctgaaacctctggtcctatgcctgtcacaccaagagtaccacctcctagagccggggcacagcttagtggttgagcacttgaggtggagccattcatggaaacaggcttcattaattttgtcatgctctggactaaaggaagggtgtttcacctccgacttttagtgggcctgattcaaaagtgatggagaagtagttgaatgaacggtgggctccctctggcctgtcatctttgtcctctgatgccttagaatacccaccaggttttctgtgctacagtcattttcctatgctcttggaacgaaaggcgaattcactttgttctttcccctagattcacgtatgaagattaccagagcaccgctgagtggcttctgtctcacactgagcatcgacctcaagtggcagtgatctgtggttctgggttaggaggtctgactgctaaattaactcaggcccagatctttgagtacagtgacatacccaactttccccaaagcacaggtactggctgggattatgagatgttgatgggtgtcttaatcactgttctgttgctatgaggagataccatggccaaggcaactctaacgaaaaaaagcatttaatttggggctttctttcagtttctgagatttagtccattatcatgtcatggagcatggcagcatgcatgacactagagcagtagccaagaacttcatcctaaggccaagaaagagacactgggcttggtgtgggcttttgaaacctcaaagtccacccccagtgacatactcctccaataaggccacacctcctaacttttctaataatttcaactagtgccagctagatctgcctgcctctgcctcccaagtgctgggattaaaggcgtgcacccagcctacacttgtatggttatgatgatctggtcaccagacttctgttgtctttggttaattatatggtcatatgttaaatgcagtgagtgccagtgtgctttttgaggcagggtctcactatgtatccctggcaggcctggaacttgctatgtagtctaggctggtcttgaattgacaaggatatgcctgcttctgcctcctgagtgctgagataaaaagcgtgtgccaccaccacacctggcataatcactttgcttttccttctctgtatgcagtgcaaggccatgctggtaaactggtgtttggattcctgaatggcagagcctgtgtgatgatgcagggcaggttccacacatatgaaggatactcactatcaaaggtaaatcaggggcacaagtttggttggatttggaggaaggtggggagagctattctactttattgtctaactatttcagctaggtgtattttttatttgtttcctcttgtttcttggtgtgtattatgcatatctttgtgggtaggttggtgaggttttgaagaatcttttctgatcttttgcatctaaggtgacattcccagtgagggttttccgtcttctgggtgtggacactttggtagtcaccaatgcagctggagggctcaaccccaactttgaagttggagacatcatgctgatccgtgatcacatcaacctacctggtttctctggtcaaaaccctctccgaggccccaacgaggaaaggtgcgcatttctaccctctgctctacatgtggagggtctgggcttgtccaagagttgggaaggaaaagttcgcttagtgatatgtatctaagatgatgcaatctgtgctctaggtttggagttcgcttccctgccatgtctgatgcttatgaccggaatatgagacagaaggctttgactgcctggaaacaaatgggggagcaacgggaattacaggaaggcacctatgtgatgctggcaggacccaactttgagactgtggcagagagccgcctgctaaggatgctgggagcagatgctgttggtgagaaggggatttggctggaggttcaagggaaagatctggtaaaatagcaaaggggaggaagaagttatagatctggagaagccattggattactaggaaagtggcgaaggcaggcttaagcttcaacactgttacagaatatcagtgcagctgccttctgtgcccgtgggtggaagttggcctcatatcattaattgccacaaatgacagagagattgtattggtgaagtgtatcaaaaactagtaaggccatttgaagagactcgggacaataaatgctcaacactaatttagttgctttggacacttcctgagatttaatcaacttatgagagtggagtgtgaggaaaacctcatgagggtcatcttctctttctccccatcaggcatgagcacggtcccagaagttatcgttgcacgacactgtgggcttcgagtctttggtttctcactcattactaacaaggttgtcatggattatgcaaacctggagaaggccaatcaccaggaagtcttagaagccggaaaagcagctgcacagaaactggaacagtttgtttccattctcatggagagcattccacctcgggagcactagtctctgctcttagatggtaacagaaagggaagaggaggatcccttcccttcacctctcccaatgttcttccaccattctgatgtctgtccctcttgctcagttgccttcacaaaacagtttaactttcactcctttggaagagcacagttgggccttttgccttcaaacagtaccttctagatctgggagatcacacacatgttcctctgggctcagcctggcttccctaaagaactagagaccaaagaccaacccaatacctcttttatttagtaccacaatatttggagaataaagagaccaaatgcattctttttgtgtgtaatctgatatgaagctgaggcataggccaaggtgggcttgaaaagctttgggaccacatgtcttgtatgagtctctgatttttcggaagtagcagaagattgagaagaggtggtaggtgggtagcaaaggatgaagatgagagaatggtaaagaaagcaaggggtgtgtgtgtgtgtgtgtgtgtgtgtgtgtgtgtgtgtgtgtgtgtccacttcttttagacttgttccatcctccagtcactttcatgagtatctgtatctcacggctctcacttctgtaccttagcagccactttctcattgcattctttttatcctctaggttttttttgtttttgttttttgttttgttttgttttgtttttttggtttttggtttgttttttccactccatcctgacagtgcagcagcaaataccttttgccattttttgtacttctggccaggttctttctagtcccagtcaaatctgtaaagttggttcatactcagtttctccttcagccctatgtgatggctattggctgtcaatctgactccatctggaattagttaaaactcaaaaaatagagggcacatttgtgagggatttttgcttaagttgaaatggaaagatctacttctaatctggatctttgaggtagaaagtcacacctttaattcagatcttaagtggggaagacacacctttaatccagatctaatctggaccactcctgctggaagcctatataaggacacggaagaaggaagaaagcttttgctctttgcctgcttgccctctccttggctggcaagtccattccttccctggcattatggtctgcttcttcaggattccagcatacactgaaaaccagatgagacatccaacttcatggactgagcagttaatggattcttggactttctgttcattttcagccaatgttggataagctgaaccatagcctataagtcctctctctctctctctctctctctctctctctctctctctctctctctctcatcttttaccttgctgacttgttaaggaaatggcactactctctcttacaaaactaaaatctcaggagacaagagaaatggctcaaaatcaaggaactaggtctggaaggatcccctaatcaaaagaatttcttggaaaattaatgatgagcccactcttgtagagaggcgtgtagggtgtctgcaaatggactgatttttcttggtttcatggacggtttcaaaacatacactcaaattgtattttttattgattctaccatggtcagctttatcatcaacaaatacttatgtactatttgtggaacactgtcctaagcaatcataacatacgttggtataagaggaagtaggtgggagacagaaaatgtatataaaaaataaacagcaaggttaagctatgcatgccctttgtctgttaatgactttttactaatcttgtttacctttatattatcatgtatcagagtcatctttttccattaaactttgaggacaccctaatttttgagaggaaaagaaggaatataataatatatggaaagcagtatactgtttgggctaatgatcatctgcttcaagatttcaaaggcgagctgggtgttggtggcgcatgcctttaatcccagcactcaggaggcaggccgatctctgtgagttccaggccagcctggtctacagagcaagtgcctggacaggctccaaagctacacagaaaaaccctgtctcaaaaaacaaaaacaaaaacaaaaacaaaaaaaaccaaagaattcaaaatcaactaacttgggagtcagggaagagggtgtggatgtattcctgagacttgagttaagaaagacagtatatcccagaaagtgctatttaaggcacatttgggaatgttttattatttaaaacaaaatggcaccaagcactagtggcacagctgggcagtggtggcacatgcctttaatcccagcactcaggaggcacagtcaggtgatctctgtgagttcaaggccagcctggtctgtagagctagtttcaggacagctagggctgttacacagagaaaccctgtctcaaaaaaaaacctaaataaataaatagaaggttaaaccacagaaaggaacagaaagataaggggtaaagtaggaaaggaagaagttgttcaccacactgatctaggcagaggtgttaaaactgcattttctgggctaattagatggccgatgaagtccaataacctaaagacctgtagtcaataactacactgattattttgtctgcctaaatgaagcaaaaaagaactattttttttcaaatgataatttttgcaatagagtcttgtatccctaactagactggagcacaactcatcgggtagtttggagttacagcttgcaaggggacaggacagtacaaaaggaggaatgaatgagaaaaatgcatcatgacatatatgtgtactaacccaaaagatgaccacaaaaggcattttgatggtggaattatgtccacctaaaatgaactctagaatagtaaaattgttagtattaggtatactttttctcaggttatagggtttgtgtctgtgtgtgtgtgtgtgtgtgtgtgtgtgtgtgtgtctaatgttgtacagtgttagctgttagaggctataaagatagcttagtggtggaaaacttgcttcgagtgtgtagaagcgtagcttcagctccccccagttaaatgtaaaaactaaagcgcacaatttaaacatgaagatacaccctagagagaacatggaaggtatgaaggtagtgacttctggctcagtttttgtcctctagcctcatctaacaatacacgtcaccatcctgtgctaagatgagagattcacttgaacaagacagtagctagtcaagcaatgcattccacagttgtgcttcacccgtttatagcgtatgagcatgagcaaggtttgctcccatctagtctgctatgtaagatgagctttgctgtaccacggtctccctgggatgattctgcggctacagatatttctgacttcttgcagagaccccaagtttagttggggcgggggagaaagaatgtgggtgagaggagaggggaccattgtcagctaacacgcacatacctcactttgaaatgcccaggtgtcagcctactattaattttgtacaaattaataacacttatttggcttggcttgttttgaaagcaggttaaaggaagtccacaaatacccagataaaggaataacaggtatttatttggggaactcacacaatgattgtaaataactgccttggtcttctgctcctggagacacaggctctgtgattcaggatgctctgaccaccacaacctaagagagctcgagccaggccctcctcttcctcataaggggtcatgtccaaacacactgaagtcacaccctaaggtgtagccaccacccggagtccactggaggaacaagatgccactaccttgttttttttttttttttccagcaatttaaatatagtgtttaaaattgggaagcagctcattcaataaagtgcttgccttgcatgcaggaggaattttgatccccagaacacatagtaaaaaaagcaggcatggtggtggtttccattcagggctggcggtggtggggtggtggggaagaaagaggaacccctgggctcagtggatactggcaagcctacttggtgagttacatgctagtggaagacttttctcaaacaaacaatgaaggtggacgacacctgagaaatgtactcagggttgtcctctggcctccatatgcacacatatgtgctcctgtacacacaggaacataacagtgttatagtttcggttgcttttatctgggatttataccgataaaacgaatacaatttttctacttctatcatacatgccagttagtgtattagatgcagtgttctatgctacttttaatcaattttggagctattgttagacccccgaaaactcaagtatccagggtcccaggccacgttcgaggtcaccccaatcaccaggcagattcgagagcttgatgcaaactgcacaaggctttattgtaatttaacgagctaaccccatgttagctcgggtctttcacccaccagccatggcggacagctaaaaaagacggctcctagggtctcccaaaagatcttatagggcaacgtaaggggagtgtctaggggtacgcacaggctcacgattggtgtgcctccaggcttggagggctttccctgtgttgattggtcaactggttgttatggcccataggccctcccagggtggttgctatgctctctacgtcattgctgtgcgcttgtctgtaaagcacacccagggttgtaaagcatagcgccaccagctaacttccgattggttccttgtcacgagacaggcatctgacctctaagtgaccaaggcaggtttatggcaagcacgtgttcggctgttatggctgccgaaagggaagctggttccttcactattttacaccagtaaattaggtatttccttgataacttaagtcagtgcagccaagaatacattctacagccttaattttttgggaagcaaagaaagtgtgaacaaaactctctcaaactaaaccttcatcaaggctgactctttagagctggagtgactgtggagagcctggactgtcccatgtccagaggcaaatgaccttgggccaccttcagcctgcttaatagccattcactgccctcctctgtcactgactgaaagctttgtgctaatcgagtaaaaatcacttggcatgtacaaacagggcagggtacaaacatgtaccagtttccctctggtaaaccattagcttccactgaccaaaagccaaaacatccaagacctgtagcaaaggtttcctccattgcttcttggatgtctctaccaatggatttgaaagttgtcttttaggggaaaagtatttattaatttacatattcatttatttattgtatgtgtgtgcacgtgagcacagggtgccttcgtgcacgtggaggtcagagaacagctttcaggagttagttttctttttccctatgggtcacagagaccaaactcggttgtcaggctcagtggcaagtactttagtttgctgccatcgaaccacccatgaaatgtgtcttgattgatgactttctttgttctgttactataaaaacttcatgaaactcatgcatgttggaaaatagaattttgggtaacctaaatccgtgttcctgggcctggtcactcatatttggatccaggataaattatctcctatccactttcagttgggagctgtgattcttggagaacagaagtttatgatattatttttttctttttttaaaagctgtttcctattacatagattgattatctttgggaacaaaagaaccttgtgagcacacagagggtaggtaaagaaacgttgcctcccctccaacagagccagagggtgatgatgccaccctctctctggcacagctgtaccttctgcgtaactttgatttgcttgagatctgtgtggcccttttcctggtaagtttcgtatgctttttgtaataatattttgttcctaaggaacattttttgaaccaacactggctgtatgcctgttttttctgccactgctaatttgtatttcaaaaaaaaaatggaaattttcttttctattatctgtctacctcatttttaggtttgggtaaaattagatttaacactttcccagatccatttgccttcattctcctgcgccagaccaaagaaacccctcctccatttgactttcactttcattcccattgtcagttggctgggtccttgcctggtttatttcacttgccagtttcctcttttctcagctctgttctctggctcttctctctagttgtgtgttgggggagggacaccattttgcttgctagctagttagtggctttgggctttggcttcccctttccctgtttcattctgaatgccgttccaagctcctgctgtggcttgaaacaaagggtgaatggcaagctgtattgcactgtagcttgacctgctttggctcctccagatgctccttactcaccaaggattgcctaaggccatttccatctcagactatgaatcctcatcactccactggaataaacaacatagtcagtgccatctcctcccaatgcaagcaagaaagtcatttaactgcaatcagatgaagattgtatattgttacttttgtttgttttaaattacatttatttctttggtgtgtatggtgtgtgttgtgtgtagtgtgtgttgtgtgtatgtgtgtgttgtgtgtatgtgtgtgtggtgtgtgtggtgtgtggtgtgtggtgtgtgtgtggtgtatgtgtggtgtggtgtgtgtgtgtgtgtgtgtgtgtgtgtgtgtgtgtgtgtgtgtgtgtacaagtacaaaggtgtggaggtcagaggacagcttgaggttcccaggactcagaggttgtcaggcttggcagcagcaactttacccacttcattctcgggcctcacaccctcctccatttggctgagttcctgcctgttcagtttcacttgccaattttgtcctttcccagctctggtctctggctcttttctctaggcagcattttgcctcttatttttgttttcaagagtcagggttttacataacccgggctggccttaaagtttttatgtagctgaggatgacctagaacacctgacctagaacacctgacctagacctcctgacctagaacacctgacctagaacacctgacccttccccacctaccttctgcgtgcttagatcataagcatatgccatcttgcctggcttcggttcttattttactataggtgttttaaatattctcactctgaacataaagaaatgttagggaacctatcatgctcctgagaagcaaagccaagtagcagcgtgtctgaaatttcaggtgggtggccattaggtctccttgaatgcccggtgctgtcctctcacaaatggatagggaccgttagtcccaaagacctgaggagaaagactattgactcaaatcatcatgaccaaattagttgaagcaagtgattaattaaaacaagcttttttattttttactcagattgcctccctctaggacaaggttcaagaggtcatcactggatatgagaaagacaagactttcccagctcaggagtaggaagtttccaaatggggggtttggggttacaggggcagaacataagcataacaagttagtccctcctgaaacaaagacatggctgcaaggtagttataggtggccatataaccttttgaaatgaaggtagggttactagatagttataaacagctttttgaaatgaagacgtgattgctattcctggaacaggcagtacagaaccacttgtagttaggttacaggtgggcatagcccaattcttaggaaacagaggtttaatcataaacagaaatgaacctaccctaccctgtctttactacaaaatgacctttaagcctaagatggaggcaggctaaatcttcagaatcactagtatgcacccttagacttatgaagtacctttgccctgatgaaccagcctgcctacatcatcatcaccaggactccactggtgttttgtcaacagtatgactgactgactttgcagaaccagaatgcttatttacaattctctattgcatttatcttatccatttttctattggttttaaacttcagtctttttttcttttctttttttttaaaaaatttttatttatttattatgtatacaacattctgcttccatgtatatctgcgtaccagaagagggcacctgatctcataacagatggttgtgagccaccatgtggttgctgggaattgaactcaggtcctctggaagagcagccggggctcttaacctctgagccatctctccagcccacttcagtctttttttaaaaaatcacctttacttatttccttactgtgtgggagcatgcatgtgccacagtgcacatgtgaagggttctctcatttatctgggaactgaagtcaggatgccatgcttggcggtaaatgtccttccccactgactcatcttactgacccatctgatcaattaattaattaactaactaattttgtggtgctagagcgctaagcaaacactctatcacacagctatctcagcccgtaactgtatccttccaacaataaagtgtgttacaaaaggaaaaccagtcacaagtactaagatgcactcagctggaaacgccagggtatgtgtgcatatgtgtacatatatacatacacttgtaagcacacatatgcagctccaaaactcacagtcagtgctgttgttcattaaaccttgagggagtctaagcatgctcatcctcttgtcaggatcccattattattctgtcagggcaagaaatgtcccacagattcacaattttgaatactgagtctctagttggtagagatttgggaaggtcaaggaacctttagcaggtatgtcactgggggaggaatttgagtgtgtataaccttgtcccacttcctgcttaccttctctgctttctgtgtgtgattggtggtccctcagcttcttgctctggccgccttctggtgccatgcctccctcattgttgtggactctccctctgttaactgtgagacaaaataaactcttttgttccagaagtcacttttggtcatggtgttttaccataatagcatatcataaaaattctgtaattaatatagaaagcatgccgtattcatttacttaaatgatctagtgtttggagtatagagaaaagcaacgtgacagtgttgtggttgtcacatttaaatcaagggagagggagacagaactgggaatagcacgtgacttttgaacctcaaagcctatctgcagtgatatacttcctagagcaaggccagacttcctaagtttccaaaacagtaccaccagctggggaccaagtatttaaatgctcaagactatgggggacatctccttcaaactactacaaggaaggaagaaaaaaagaataaaaaaaatcaaattaagacaaatagaagaaaacgcaaataaaacaaaactgagcacagaggtgtttggttgcttcttggagcagcatcattttgctgggccagtgtggcttttcactgggcagcagggtccttcaggccaagaaaactgtgggaaccagctaactcataagaatccacacaagagaaaggcccaccaaccactggcctgctgccctgcagctgacaaatgaagctgtcacaaaggatcccggtgcctgcctatctggggtatgtgagaggttttcaatgtcttccccacatcacttctccagaatggcaaaggagacttcctgggaaccaacctggggtttcagagagcattatctgtggcttgaggagctagtacagcctacctagtgggtttgtgtgaagataatctgtgcgcttcactggggatgactctgtgctgcgattgcctagacccagaaattcatcttcagcactgaagacttgctggaatggctgtaatacataagaccaatattaacaagtgctgaaaaagaaacaatgcactcgcctgtagttagcaggattgaaaagtaggtttagattagaaagtaggttggtcattctcaaaatgtttagcacaaggggctggagagatgactcagtggctgagagtattgggtgctcttccagaggacccaggttcaagttccagcacagaaacagtgcttcacatccatctttaactgtggttctaatgagtcttgattctagcctctgtgggtacttctggaatgtggtgcaaaaacctatacacataaaagaaaaacaaagctccataagatccactcttagctatatctttttagtttcttgggcaggtaaccatgaatcaatgtggtaggccaggtcagctggttaaaagataccaccaaacctgatagtaaagaattccagaagactcccataaccacagcaagaggacgctttaacggggtcaatggcatctttgggaaacaatccccatgcctattatgttattgtgggtgttgtatttcttcctggcgtcaagtgaagaagtgagatgtgagatgctcatgaagtcaacacttgcctttccattttgtgttttccttctctccctccttctaagatttttctatttctatggctcatatatttgaactttggttctcacttgttggagtgcttagaaaggattaggagattaggagaaaagattaggtagtcttgctggaggaggtgtgttactggggtggggtttcacaaacccatgccagccccagtctcactttctttatgtctccatcttgcggatcagatgtaggtgctcagctactgatctagggccgtgcttgcctacctggggctatgttgcccaccatgatggccatggattaatcctttgaaactgtaggcaagccttcaattagatgcctttttttatttgctttggtcatgatgtttcatcacagcaacggaaaagtaactgagacacatgtacagaaaaacatgcaaggtagcactattcataatagatgaaacccagaatcagactagcacatcagctagtgaatggatacatttttgtgtttgtctatacgatggcatactaaaccactgacacagacctcaacatatgctaagtaagtgaccatgcatgcatttgtggttctatttatattagatgttcaggcaaggcatttatagagtttagtggtctcctgtggttcagagtagaacaacaattaatataaattagcctagaggtcttatctctagtattaaaatagttcagaactgacggtgattgttgcagcactgagtaaagtgtctaaaaaagaaaaaaaattgccgggcgttggtggcgcacgcctttagtcccagcactcgggaggcagaggcaggtgggtctctgtgagttcgagaccagcctggtctacaagagctagttccaggacagtctccaaagccacagagaaaccctgtctcgaaaaacaaacaaacaaagacaaaaattactgggttgtacatgtgaaacagatgaattctatggcatgtaaatatatcccaataggatgtattatattatttatttgcttaagataaggtttccctcaatagcctaggatggcctcaaattcacaatgatcatcatgtgtcagtcttccaagagctggggttataggcatacatcattacgcctaccttaataaaatggaatgggagctggatgtggttggcacacacctttagtcccagcattttgaagacagtggcaggcggatctctgagtttgacactagcctggtctacatgtagagggaactgcaggacagccagagctacacagagaaaccttgttttgaaaaaaatcaaaataaagtgaaatggattgggggagggtagtagtgggtagacaaatgatgatgtcctggtccttgcagactctggtggacagaaaacagactgtgactcccacagttacacagtatctattgttagttttcaggcaaatgctttggcctccccttggggttctgacaggatacttcctcagctgaaaccactaagagcacctcctgtgcatattcattatgttcccttttaaaaggaccttgcccaactcacatctgtctctgtctctgtctctgtctctgtctctgtctctgtctctctctctctctctctctctctgtgtgtgtgtgtgtgtgtgtgtgtgtgtgtgtgtgtatgtgtgttcctttctctgcttgtctcccctcctctctctgcctctcttttctcttctgctgttcctgtccccagaggctggtctctccccactccccaccccccatttcccattcccttccccctaataaaaatcccctcaatatgagctctgtgaaatgacatctttctcttgtgccactctttaatcaaacctgtcatatgcagctcaggagccacctggctggatccacaccaatgaggtaaagccagattttgaggctgcaggaagaagcttttcctgaagcaaagttgacactgagattcccaaggcacattccagagaggagtaaagtcctatccaaggtcatatgtttccataccttcatctgctttgttggtgctttaacactccactttgaaaacatcacaacataaaacaaatactagccaggcgttggtggcatatgcctttaatcccagcactcgggaggcagaggcaggtggatctctgtgagttcaaggccagcctggtctccagagcgagtgccaggataggcttcaaagctatacagagaaaccttgtctcgaaaaactaaaccaaaccaaaccaaaccaaaaaccaacaaatagtagaaaggaatgagtggttaacattgtaaaaatgttgcatatatatatgaaattttcaaagaataaataaaaaacaatttaaaagaaaaagtattgtatacattgttagctatcgtcacagcaaatgctggtgactgtgctggaatccttgactatcccttggcagaaggcttcaatctttccttaccatatccccttagtctttctatcctgcctcaaataagaacttactactataataagaagaatattgttattaattataatgagtaattatcagttataacatgattatgttattgtagtaattaatattaattatacacaataaattaatatgtaatactttattattattttatgggaggaaagataccttggaacagaaagatgtcaatctacagggatgtgagtgtgatgtggaaataataaagcaggagaacagggagagatgagcattggaggagcctcacagaggctgcaacgtcagcatatgtaaagagaaggctggcaaataggaaggctggaatccctcgcagaatctgactaaatctggctactggcataggtgtaaagcacttgaaagtatctggcattggcctgtggttcactataatacaaatacacacacacacacacacacacacacacacacttgctcgggggctttgagacattgactgtggaagaattgaaagacaaagaaagttatgaaatgaaaaggaagggacccccctcactgcagagtccagttgaagttttcatcaagctgaaagtcagatttcccagcacagtgatggtgatgcgtctcagtaggtaaaaacacttgttaagcaacaagttcaatccctgcatctcatggtagaaggagaaaaacaatttgagaaagctttcctctgaccttcgtatgtgtgccatggcacacacacacacacacacacacacacactctctctctctctctctctctctctctttctctctctctctctctctctctctctctcatacacacacacacacaaacacacctacctacattcatacaacatacacacaacaccaccaataaatttaaaaaataattctaacacaatgaatatttgttatggccttgttcttttcccagctttaaatccacattttctaggaatcttaacccaaccactattcattgtaaaaggtattttccatcccccttatacacttctagtggttcctggttttgctttatcagattattattccattataaacacctctggagccacttttattaatataaataaataagtaagcactagaaaagaaatagttcagtggcaagagtgttggttgctcttccaaagaactggtgttcaagttccagctcccccacgatggttcacaacagtttgtaactccagctctaggggatccaatcaatgccctcttctggcttctgcaggcacttggtgcattcgtagcacacatgcactcacatgcacacacacaaagtaagaaatggagggaaaaaaaatctcagcagccatctcagatgtaaattgaaagctaccaaaatagcaaatatacctaccgctgaggcgtttaatggcaactctcccttgagaagcccgtgcccatgctcaagtatatctcatttccccaagcatgtcactttctttccacattcatggttagaatctgtgttaaaaacttctcccatgctttcttcatgcctcactcttcctcgagcagtattctttccatttttcatgacagcttctttcatattggctcatcttgatttttttttttcctagttgaagccaaggatccagttttacccaaggcccctaaaagattaagagaacttcccagactgctggaggtgacagtgtggagtacctctgtttccagtactgttcacatgagacgcacaatgatgcaggaagttaagtagaatcatgtgcaacagagcatgcatagaaagcctgtggtatgcaaatgagttcaaagggactggagcaggaagtacaaactggtcagccagttttaggggaggaacctaggaatcaagcagaagccagcaacgtccttggttatgatttggccagagacgaagtattccaaaagagagcactctagctccttgtctggtttcttgttatctttctctttccctttacacaacagatgagcaatccccaccccccacaacatatgagcaacccggatccccacccccactggagatgatgtgtgaagatctgattgaaactgagaggcacctggacaccttgttggtgccccaactggcctgatgggctaactgtgcctcaccaggtttctgccatcaattctgtaaaacaccccccactagctgcttgcctcacagacaacagcctgtgaatttcattcttttaagttggtgagacaaacggatgccattgggttcctttaatactgtggatgagaaaacttcttccattctcagagatcacaacgatccccattttacatggaccaacagttttttcttttctcttcttttttcttttctttttttgacatggggtctaactatgtagaccaggctggcctcagactcatagagatcacctgcttctgccttttgtatgctgggcctaaacgtgtacaccaccatgcctggcatggaccaacattctattttctgcttaaatcttgccttattcgtcttccacttcctgccctctgaactcagctctgtgccaaaggtcggaggtctgatgggcactatcccctagctctcccctttgacccacttctctttagtttctcccagggctgtatgctagttcgaatgaaaactcccgaggaagacccatgcctgcagaaactgagtggctgattagaatttcagcactgtggagaggttggaatgttgcaggtccaaggggctaattaccttatcttgggctgttttagccaccctcgcacacgccttgaacaaccattccttgctcacctctgtgtctgaactaacaacatatgaagggaccagccccctgctttagcagccatgacagggttcaggaaagactcaatatgcgattgcctgaccttgtgccccagtcactaggaggtcatataccctctctcgttgcaaggaaccaatctggcgggactgtgctttacagctctgggtgtgctttactgtacaagtgcatgcagagcatagcaaccaccctggaagggtctatgggccataacaaccagttgaccaatcaacacaggacaggttgccaagcccagaagtgcaccaatcctgagactgttgcattcccctagacaatcccttatgctacccaatatattccccaacttgtggttcccctgggtccttctccagtcactggcctcgatgcatggacaaagtgcttgagctaatggggttagctcgttaaacaataaaagactctgcttttgcattggaatgggcctcttggtgatcttgggagttcagaattagggcacaacacatattgtaactaatagattaaaaaaaaaaaaaccttctagaatctattaacctagcagaccactagcttccaccaacctgaaagccaagaatgccatcagatagcatcttgggcctataggaaagcttcctccatctcattgtctctttgatgtactcaccagtatattttaaacttgcgttgttttatgactttctttgttctatataactataaaacttcacaaaactgcttccacattggaacactgaatttggggtgacctaaatctgtgtgcccaggccatgatcacttaaaatggctacagaataaacaatctcttactccccttaggataagacctgtggtttttgcactgaaactagtgacaaaggcacttctccctgccttccttccctctatgacttgggccctagtaagcatagacagagggagcttaggtgagagaaggttttttgggggatggagtgaggtgggggactacatcccgcgtctttaagagccactgccagcattcactgctccttctgatgctgtgtacagctacaggaacagctttcttttctctaccaatgcaatagttagaaggcaggacgagtttgaaagtcaagcaaagccaaagtttattaaaaggggacacattttttcgaatttaaaagaaaaactttgttgggtgttggtggctcatgcctttagcctttaatcccagcacacgggaggcagaggcagatggatctctgtgagttagaagccatcctggtctacagagcgagctccaggacaacctccaatgcaatacagagaaaccctgtctcaaaaaacaaaacaaacaaacaaaaaaaacaaaacaaaaaaaagaaaaagaaagaaaggaagaaagacaaacatcacaagttctaaatctcaccaatttcccagaggaggaaaattgagaagaaaagcagaaaaagacatttgacttaagggggtacacaggtcagccacgagacagtaggcagctttatagattgaacaaggaagcccaaagttccaggtaaaagcatatttagcttttgtcagataaacagtaaaacaggaaacaggagaagctgagactttctaagtcaggactcggctgatacccaactgagcaacaagacacagactccgccccctccagctcctgcagcctcacccaacccctccattactcactgtccacttggttgccttaggctccttgctctccaaccatccctctcacactctcacacccatctgattttctcgggtgtcccacggagaaagggagaaccttagacttcatttaaattccaatatctccctcacggctgtcaccctcaccccaagttactggccccagccccaccatgtagctctggctagcctgggattcacagagacctatttgtctctgccctcctgagtgctgggatttaaggcaaatgctgtgaatcccaaaccattatggccaaattaattaaagcaaggtttttcacacaggctgtctccacctaagatggagttcaagaagtcagcattggacgtgggcaacataagggtttttgtagctcggggtagggggtttccaaatggtgggtttggcaggcaaataggggggagttcaggaactgcaagataaggcagtcataacaaccttttgaaacaaaagcaggcttgcaagatggtcataacaactttatgaagcaaaggcatggttgccctttcctgaaacaggaaatatagaaccatttgtagttaaggttacaggtgggtcatagcccaatccttgagaaacagaggtttaatcataaacaggaatgagcacagttttcttcactgtaaaacggcttttaagcctaaggctggtttgtaagtgcctccacacctggcccaaatctaccttctgcaagctttaagacaggaaagagattctactgaagagtagagggggctggagagatggctcattgcttaagagcactggctgctcttccagaggactggtaatctgcatgtcagctcacagcatttccagtccctggagatctgatggcctcttctggcctgtgtacagaaacttcctgtgcctacagacattttttaaaataacaataaaaataaagaagctgttggtaacattctgaacatctgattcaggaactagggaattactggttaggctttactgagaacctttttacccgcaatgtctgaaatacttttaaaattatgtcatccaaaacgttagggttgggatgatgcttgcatggaatgggacaccacagcactgccctcttacaatacttacatattcatagacctccatttcttttgacctgcttcagggtaggatccaatggctgggtctctagggcagcaagcattaagtgtggcaggttccagagaacaaccttttggcttaataactgagaaatcctaaacatcaaaccagtgttcccttaaggctgacctagggagatggggggagggtggtgactcacatgataggtggggtaggagccttacaggagccagggaggtttgtgggtggaatccttgtgcactcagtggtgacggaagccatttgttctggcagagcagtttaaagggctgttctgtgtgggcagtagtttatgaagaaagtgtttgggggaggcttaaggaactagtgattcctactgagaaatgtggtttgtaagtggcttattttgctaaggtccagccgaaaggctgtagcgggaagcaccagagggtcaggtgaataggtctttggtgttgcttaaattttatataaatattatgtggatacaaaagcaatatatatg

SEQ ID NO: 39 - DNA, 48610 bp, Cricetulus griseus
  >scaffold_45 dna:scaffold scaffold:CHOK1GS_HDv1:scaffold_45:3901418:3950027:1
  misc_feature 7367..7466: /note="n is unknown"
  misc_feature 21781..21880: /note="n is unknown"
  misc_feature 37047..37146: /note="n is unknown"
gtaacacaacttcaaagaatattccacaatatgtgcgttatttgtctgcagccacagaaatacttccacaagatatgaaaaatgtgcttttgttgtttactgtgtggtttcttttagcttaatttttgagacagggtctgatatagcataggctagcctagaattatgtatctgaggctggttttgaatttctgatcttcctgccttcaccagctgggatcacaggtttgtaccaccgtgtccctgactgaccaatattaatgtgatcttttctcattccagaacttgtggagagttagagactacgcgttgaccagagccaagcccaaccctccacaccctcggtctttacagtgacttttgactcagcgctgtcccactccgggcgtgggcgtggccagctcagcagaggccagacgcagaatctggacagcctctgctggctgcccaatctgctttggaaagcttaagggtggggcgatccactgtactccctcctcctggggccctgcctctcggccctcctcttccccctcattccattcctcctgcagtctcctcttttcccgatacccagatgtttgttgaagggtgtttaggacaacaaactctatggaatgcattataataacaaggcggttgaagttcggaggttgtttgaggccgttgtatggggcaggagtcaggctacctaccgtctgaaggaactgttaattgtggataaacaagtaatggcttctaagataaggctcaagttttagagccagctctgttttctgaatgtgtgccttttgctcagcgctggcccattaggaagggacgggagatcagatagcaaggccacatcccgaggaagactagcatttcttctgcgtcctaggagctgaaaccacttggctgatcctgaagactgcatcaccactactggaaactagctttaaaaagtctccccggtgcaaagtcatcttttgaattttctcgcgtctccccctcccaccccccgcccccagctatatatacttttaaaaatcatggtatacaaaccattttgttccattcgtttcacatattttgaactctggggggggggggtgaacataagctctcctgcgcgttgggtaagtgctctatcattttcatgttgcacactatttcttcacatggtcataatacacttagtctcacttttgttatttgttggttggagctttttgtcgtgtaagtagaacttttcttcttttaagtcatgcctttggaatcagtgccctgagaggctgaaaacattgacattgtgtgtgtcttttgttctgtggacccagataacagctgaggacatttaataacaaagcaaaggggacagccctcagatatctatatctgcatacaaacaaagctgtgtgcagtaaaaacgtattgacacccactatgccacagattcacactagcaggaaacgggggtgggggtggggtgatgactaaggggctaaggggcaggccctgcccttggggagcacaggagctgtggcctttcaactttctctcactaagacacaaaatattcaagactgctaaatagatgacctttgcggatgctaccaaattatgcagagacataaagccttgtgccttcctgttttttttttttttatattgagtattgaatgaagttactcttacctataagcatggttatacagagccaggcatggtggcttatgtctgtaatctaagttccaggctagcctttgtgtaaacgtgacaccttgtctctaaaaaccaagggccaggaagattgatccattgggtagagttaggcttttttcaccacacctggcaactgggtttgaacccccaaatctacaagggggaagaagagaactgactcctataaattgtcctatgacctccacagacatgctgtgttatgttatatgtatgatcacacacacacacacacacacacacacacacacacacacacacacacaaatacctgtaaaaatcataataaattgctgtttgagtggctgacttgagttgcataagaaattgtacaattaatgttagtttgggattaggacagaattcccaacaatttcttaagtgtcccaagacacacattcctatcattttgtacaatgccatgatgcaaagtggcattctaggcactgacaattataaaatcaaaatattgatcaattctagaaaatgatgaagttaccctatgtcctatcatattaagaattcagccaggatttaattctttatgtaaaaataaacaagaacattaccccataggtagcaggtaaaattttttgtcataaacaactagtaaaattatgtgtataccaaagaatagctttaaaaggttttgtgtatgttcctgtgtgtggatacatatgtgtgggtacagtatgtattcacatgtatgaacgtacaagtaggggtcagagtacaaccttggtgtcattcatcatcttcctgtggtgagatattatttatgatttattagagcttgcctgaggattcagaaagcaaagtcagctataagccataggagccaggcacacatctttaatcccagcagccaaaagctaggaggtggtggtacatacctttaatcctaggactcaggagtaagaagaggtagaccgatctctctgagctcaaggacacccagggatacatgagattgaaccagttgaaaagagtaacagatcacttgcctttaattccagcactagagggctataaaagatagaggcagggtcttcagtattcggtagggggcattcattctccagccatgctgagaggcagcaggatcagcccactcagcctgaagttagtggtaagagctagtgaccctctgctttgcttttctgttcttcagcttgaagtttgaaccccagtagcaagcagtctctgggtcatttattattattcatgttacaccttccaccttttgtctgagcaggggttttcattggcctagaacttcaccaagcagacccggggctccaggatcccatctcccccatccatcctgcagtggctgggatttcagactgtcgtcactgagctcagcctttcacatgaattctggggatcaaactcaggttctcacacactgaagtccaacactactgacagagtcattgccctaatataaaataaacagactttttcagtaattgtttggcgtgtatacctattatacatacctatatacttgaggtaaatttgttctgggtgaaaaggagttgaaaatggaaaaagtttgaggagatctgatctagaaaaccgggatgaagttgattactaagaatgaactaatcattcccggacacaggccttcgtgctgggagagaggccagatgatcctttcatgtgtaaatctgtatacagagcgccacagaaggttggccagaatggcaaggacacaggagctgttcattttacagattcattcaacctgggtccagcttccagaatgaatgggaccgagaagaactgtggtgtccagagggagtcagtggtcttggagttggctaatctatcaagtggtggttctagcctgagaacacagcgactagcagcttgccagaaaaaaaaaaacaaaacaaaaaacaaaaacatttccagtcttgaaactagtgcttaggaatgtgggtgggacaaacagataagtaaactgtagactggatagtgacaggaagaaggttaaggcaggggaagacaggcgttttagagaggatgtttaaatggctctcagaaacgatcttagtaagaagatggtatctgtacgaaaaaaagccttggcatgtctgaaggaaaagggtattctcgatgaaggcctggtggtggcaaggctctgagtaggaggcctgtgtggctaaggttggaacgtgcttctggggtagttcacagcagaaagggttaggaagcgttccaggcattggtccatccagcacatcaggactgagctgttgggaagatcagaacctgcctccgtttccaactctagccgggaggaaaggtttctaggaaagtcctggagcctaattataacccccttccccgttatagacttattagcatttggaagacttccagggtagcacaaggagcctgggaagtgattctgtagcagcccctaattgctgtgtagccttaggggtgtcttttatcgtccggtagcctcaattacttcatctgtaaaatgagactagagagccttctcatagcgtcacgagagatcgttgaaggtacctcttacacttccctataatgtccaaaaagcaaaagtgaaaacggctgtgacttcactcagcccttttcggctttttgcaaagcacactgcgtgggtttgtaggacccaccgtgagtagggacacggttcaggtctcacccagcccgcacacccggctgggagccgcagagcggctgtgggtagcgcggaggcgacgcgggaggaggtgcgggggtgctgggcggagccgcagagcccgaccgggcgacctgagtctggcgaggtactgtgaacgcgttgggagtggaggctgagaccgggcggggctgcagcgacacggttgagggcggatctgtccccgccctcgctcgcgtccccgcccgctccaggagctcccaacccgcgcggcgcgctctttctccgacagctgctctgggagctctgcgcgccctgctgttccgtgcctggcccgtctgtcccctctgattgtgcctagcgatgaccacccagcaaattgtccttcagggcccgggaccctggggtttccgcctcgtaggcggcaaggacttcgagcaacctctcgccatttcccgggtaagagtgtcctgggacgcgcgtgggaaccgggcgcttcggtagggtggcggcgctgcgcccggaggggagtcggggaggttggagcccgcggcgaccgcggcggggcacatcaaggtgcgctgtgctctgagcgctctgtgccatccgctgtcccttccccgccacttcgctccggggcaagcgggctccttgcttgccgcgccaaggccaaagacagttttctttctgcgccccggaagcgtggcatggcacgcagacgctctttgtgcccgggcgtgtagacttggagctccgcagaccccgcgcgctgggagttagcacgccctgttcttcacagtggaagagctggggagcgctgattggaagcagcagaaagtcctggaaggtgaatgggagtacagaggagttccctggaaggcgagtgggattcttttagctaagaactgaaacaactactttacactctgaaggtctgaccccatagctgctggctctcagctctgtaaagcctttcacaggaaacagcggagttgggaagtaaccccagataaaccttcagtagactcgctctgcctcaggtgcttagatcacctttctgtcctccaggttatctgtgataagttcatttcctcctggaagagtagttccaaccctgtgtgtggtggcgatgactgaaaacctcttagctgggcctcatctccgggagggctggtggcccatcacagactgctagacttgtgatccataaatgaaatgtaaccccctgtgagactagggctcagcatttgaaggtccacactttgggtatgtgatctgggccaaacaaggtctatttcccagtgatagtcaacgttttttgctccttcagatagaatgggtgtgtgtgtgtgtgtgtgtgtgtgtgtgtgtgtgtgtgtgtgtgtgtgtcttactaaatatcttctgattaaggagagagggggaaacttcagcaatgcttggtctagagggaccacattctattctttggtacgtttgcttgctgaagctgaccttaaacttggttccccagttttggaaatacccctcttttcttagagggattctgggatggaagtagaagctaaagatcctaatgggtcctcttgacgtaaggccatgcttccagcccctgaaggagatggatgggagttgcagaagcactcctggctccccttggcctttctgccagccgcagggcctgcagctcaggctttcttacaggtgggcctggctcagcaaccagctctttgactatcctactccaaatgagcaggcagcctggttttccccttgaccatgtcatcgtccagagatttctttgttattggagatatgagatgctttcccaccctccagtcaaacttctcaagtacgggaactgtgtcttagccaacctgacctgttagactaagcctggcccaggactgcacctgactgttcctagtgtgtccttgcagacagaatgcaaatgcttccctatggagggcactgcctctgcacatttagagttggttacctcataggccagttgttcccgctctttgtgtctataattaacctgtcagtcctctccatttccaagaaaccttctttttaagcaggggaggatacagtggcagtctgttggaagggtagtcttggcttgtcatttggctgcttctaacaccactgggaaaatagcacaatggtccatccggcacagtgtagaaatgaagctggcatggactggaaaacacaccgaatccattgctttggaccttcatgcattaattaattttactcctttttattttgaaatagactctcatgttgtatctcagggtgattttgaactctgtatgtcgacaagaacttctgatcttcctgcctcccaccttctgagtgctgggatgtgtggcacatagcgcaggggattgaacccagacgtcatgcatgctaggcaagcaccctaccaactgagctacatccctagtccatactccacactcatggtgaatgagcacatgccaaatgcaaactcctcagacctgacaggatacagctctagagggaagctaatcttcattatgcctttggcaagtgttttaattgaaaagtgaaaatgactcagagacattgtcattgtgatactggctataatttacttgcctcttcaccttatcactgcctctgttcacctcttgggactgagaaagtgattgtcattaagagaatgtgtcatgggtggtctgggatctggcattggtctggagtctagttcttgtccaagcggtacctaaggtaagcacccagagtttatttatttttttaatcactgcagtggggtaacagcagcccttggctaccagttgaagaatgtctagtgctctgtaaacagagcataatggtgaggagcgagcattggtaagagctctgcccaccttctggctgctgtgtgccacatttattatcctgggcagatacagtttgcaagtacgttttttttgtgtaagtagannnnnnnnnnnnnnnnnnnnnnnnnnnnnnnnnnnnnnnnnnnnnnnnnnnnnnnnnnnnnnnnnnnnnnnnnnnnnnnnnnnnnnnnnnnnnnnnnnnntgtgtgcaccttctactactcctttgtgctttcatctgtttttgtgagaaacttaaatatcacagcccaaatttctaacaataaatggatataaactagtcttttctatctagaatctcatttaagactcacctttgactccctgctgtcatgtagtgtttaactgctctctgaaatgtttttctgttggttcttgtttcaacagtgtagccccccctccccggtgtgtgtgtgtgtgtgtgtgtgtgtgtgtgtgtgtgtgtgtggcctcctctatgtaatttcacatttcctctagtagctttcaagggaaaccttcagagaagtccacgcccatgctgaaatcacttgctgctgggctgtgctgacaactaaaaaaaagacaggaagaggcggagccagcgataaggggatgctcttagttggagttgccacttatttgccccttgagtcctggggaaccctttgctaagagcctgtggttttatactaagtgtttgtgcccttgcccaaggaccccgagggggtgcttaataatggttactctgtagccagaggtctttctgattttcaagagggttatttccagattcaagtagagttctacatcgtgtcataaaggttggaaaagcagggctcatcagtcaggttataaaaaggaagacagatctaaaactgccctgtgtgcataaaggacccgagctgcatgcatgcatgcatgcatcctgcacagtaaatcacttcagaagagttagccgctccggctgatcaaggctgagctgggagaagggaggcagatggacccaagagaatgacctgaagcggaagcttgggcctcccttcccaaacctctaggatactggccacggaggttaattttctttttaaaaacaggttctggttgctttttaaagtttttagatttatttattattttattgtatagatgttttgcctacatgtatgtatgtgaactatgcatgtgcctgtgtaattgtcagacgagggtgttggatcccttagaactggagttactggtgattatgagttgccattgggtgctgggattcaagcccaggtcctctgctagagcagcaaatgctcttaattacggtgctaactctccggctccaagctggacaatgaatgaagcagggacaatggctttcagatgttgcattgtgggtggtactctcctgggctgatcaggtctggaaaaggcacccagtggctgttgtgtctgtgccggctaaagctgactcccaagctgcctactttcctccaggccatgacttgctaatgttctgtggaagacagcaaggctggtatcttacttagtgtagatggggaagtccaagtgccggcaggttaggtaatttgttttcatttacatgtttaaaaaaattggctcaactgcttcttaacttccttgtaacagagtgattggttacaaatggacaaaagtgcttatgttataaaattaactttttaaagcatggtttatttctaatggatcttagggggaaaaaactgaagttggagaagctgaaaagatgggacttggtcccgtgttcagtgtcaggattcaagcagagctcttgccctaggcagctcagtagatgaccctgtgaccctgtggaagtcattttccttctttgtagagataaataagatgataaataagatgataaatgataaataacctagtggttaagagtgcttgtgactgtttgagaggaccagctttcagttcccagtacccatgctgtgtgtttcacaattgcctataactccagctccagggggacacactcttctggcctcctgggacaccagcacacacatcaagtgggtgggaatataagttaaaaagttatttctaacaagcaaataagttgtatttgtaccctttgagtaacagagcctagcatctctcatagcattacttgtgccttcagttctaagttgattaagaaaatgtactataaattcaggaatattttcagatggacatgtattgctaatcagaaaagcatatctgttgctgggcttggtgtcgcacgcctttaatcccagcactcaggaggcagaggcaggcggatctctgtgagttagaggccagcctggtctccagagcgagtgccaggataggctccaaagctgcacagagaaaccctgtctcaacaaaccaaaacaacaacaacaacaacaacaacaacaaacagaaataaaaacaagcacacctattatagacacagaagagattcatatgagaaatatttattttatctacttgcagtaatcagagtacttaaaacatatgtagtaggccttgaaagttactgctggaagtatttaatgaataccttgtgaggtaggtacattggagaccctcattttacagataaggacattgaagtatggaaatattgcttgcctatggcatacaatagtgagtgactattggatcagctagctccaaggcttgttctcttaaagtcaaatattttaataaccactaataaattatgatttgctaattatgcgcttacatcactctcttccatacaatctaaacccatgaccaaagtgaatacagtaccagagtgtattgttcagcaggctgctggccaggtagctttagtcaccattccgcttcctgataagccatgacaatgaatattgcattgcaacagtgttattcagtgcagaactccaggaaaacctagtgctggctaagcatcagtgtgaagagtacgaccctcttgggcttcttacctgacagccacttgcatctgtgaggattgactgggatacccgtttagatcagagtgtcccgggaaggagcagggcccctccttgacccttgtgaaaggcctgaagccatagcctcacttgggagaggttttattagtcctggggtcctaaacccttatgggcaccaagaatggaagagcggaggagttaagggctggttagagaaaggcttgtttaggtgctcacagagcatctggggacagtttatggcaaatgaccatgaccagatgcttcttcagttcttctgtcagttgggccaagttcaaaattcagtacacctatgtggtggtttgaataagaatggcccccatagacctgtgtatttaaatgcttagtcaccagggagtggcactatttaagaaggattagaggtgaggtcttgttggagaacaggtctctgtggatggacttggaaatttcaaaagcttgtgcaggtgcccagtgtctctgtttctcttgctctgcttttcggattaggatatagctatcagtactgctccagcaatgcatgctaccatgctggactacacctctgaaaccgtaagcaagccctcaattaaatgctttctctgataagagttgtcttggtcatgctgtctccccacagcagtgtaacagtgactaaggcatgagacaaaagtgttagtaatttctgtatggctctagcacctttatggttgctatactgtttttagcttcatggtggaagaagtggacaatgatccgtcacaagatctttgcgtacgtcgaattccgtccttggtactaactgccatgtgcacggaaaacagcacactgacctcgtcagagaccagcttctgaacagtgcttccaagtgtcattttatagatgccgtatcaaatcaattagctctataagctcagctagtaaggccataggtatgactatgtaagatacagatgcctaaatgcacaggatgcagagatgatttgcattatcaaaagtattctagaagtgctcatacttctaaagctaacagttctagctggataattaatagaaatggctccactttgagcatcaagagtcatgtttgagaacttccctgtggcaaatttttcaatagcctcgaattaaaaaacattttagatttacttattttttttatgttatatgtatgagggttttgcctgcatgtacgtatgtacaacataccaatgcctggtacccattgagttcagaaaagggtgttgaactgagtttgggtcctgtgcaagagcagcaagtgctcttaaccactcagcctccctcttgccccattagtcctaaattttaaataattcagatgactactaccaacaataatgtgtaggtaaattctggttgaatcacatgccataaaaccccacaagactggcaagatgtctccacaggtaaaggttcaaaattaacttagagtcttagatgtcagaattgggaccaatctttgccaaaaggtttgtgacaaatgaggtttgaaaatccatgttcagtttctttatggcttgctacgtccatcggtacatctttcttggggagagaattcactaggcattttggtgacagtttgtgttcttgtctgtgtgtacgtgatacttaataagtttacatgtgattgtcataaatgaccaagaagccaggcatgcatggaggctcaggaggctgaggcaagatttaagttcaaaacccttgagctacacagtaagttccagtgtagcccgaggtgtgtgagattccgtctgaagaaaagtgaggaaacaatcccaaatccctcaaagcagaaggtcaaagtgtgggaaggcaaaggtcaaaagaaaaagaaaggaaaagaaaaagaaaaagaaaaagaaaaatgcctttctagctgctgtacttctcggaggcaaaactgttaatgtctggttataaagtgttgcagcctggttttcatggaagttacattttcagagttaattgctgtatcgtggtgggtcatgtagacgtcattgttctgtattttctgtcataattttgttagaacaagtgaagaattaaagacagctcagtatccttgggaaatggcattctttggcttctgttgtatgtaggttcaaaccctgtcttgcccaggttttacttgtatgtccgggggtggtgggggcaggcagatcagcccctgaaaactcagcagctgtttgaggagtgggagtaatagtacttacctccgaaggtcattgtgaaggtgggtggcatatgaaaggagctagtgctctggataacccatagcaagcatcaggataccacacactgttaaacggtagctacattttttttagtaactaaaatttttttcctttcaaaaatgattttattattttatgtgtatggcgttttgcctgcatatatatctgtgcaccgtgtgtgtctggagcccctggagcccctgcaactggagttacagatggttgtgagctgctatgtggttgctgggacttgaaccccggtcctctggaagggaacccagtgctattaaccactgagccatctcttcacctccaaagattcattttaattatgtgtccatatgtgtgtatggtgggggtatcagtatgggtgagtgcaggtatctacagagtccagaagcgagtgtgtcagatcctggtagttgtgagctgtctaacatgagtgctgggagccatgttctggtcttctgcaagaccagtatccactcttaatccacaggccacctctccagccctgatactgttttgaaccctttaagcacacctttccaacaacctaatgggatggatattgttgtcaactttatctgatcagtgaaggaacagaaacagccagaacacagtctgcaaaagtgaatgtcaggttttggttatgggtggcagtggttaggactgtttgaaagaaagcatgcacagtcattataggcttttggatgcttgagaattgacgtcgcttatagaggaactaaggtactctctttactgccggctccttttaccttcctgtcttccgaatggggattgcccagaccaagaaagcagtgagtctgtctgaacttccccccgggcagactgacaactttattttgcactgtgcataaagggaagttgggttagggcacagctcatctacaagcacccagcctacttaattgcctcatttcctggagaaagtggttatagactaaccaagaacattctgaagtcgtgttgtttcaggccaacctgtgtatcctcatgcagtgtttgcggctttgatgtggcttcagggtctgggtgacagcctggacccacaaactgcaagccaagagaacccgagggaggagttcatattcagcattgaaatgtggcaggcaggctgcttctgtgttgctccaaccccagtttagactgtcaaatttatacctaaaaaccctgacatggctgttaggtctacacgccattgcaatggtgcttgaatttcatgttttgttagtccggggatgcatcttatttatgcttactttgtcactttgttccgatgggtttaaggcaatttacaacaccgaaaacatgcatttgtgatatttaaagcacaagaacacatttaagatttaatgaaatacttggaacgtagaagcggaaacagcagtgttccaggaatgttaaataagttggtttctgtaattgcacactgactttagctgtgagttttctggccagggcaaaatgggaaccatgttgagtgtgttagacatctgggctgacatgccttgtataatatttgacttcagttccttctcagaggttgaccaacattgatagagatctttttcctctctttcctctccctccctccttttgttcctccttctttctcttcccccctccccttccctccttcctttcctcccttttttccttcttagcttctgttttagtgtgagagaaattctaattgaagtgtcttcagaggacctcctatgtgcaggagtgtaagtccttcaggttgtttcttgaggaactgggcttttaggtttaagtgtttattgtctatgtagtaatttaacttcattcaggaaggaagtcttgggagaagaaacagtcaacatcccccttaaagtttccaaacctagtgaacatcaattggctttgctaggagatgttaaacgcagagattgggggctgagggtgtggcctaatagtaagaatgtatgcttaacatgccagaggccctgagtttggccctcaggacaaaataaagtgaatgaatgcatgagtatttctggatcattctgtgttgatgtgagatggagtgggggctctgtgtatattttaccccctcctttcagggtatctggtagctaaggggtggaaagccagtgccacatccctgcaaatacagttctgagctagtggtgagcgggatcccaggtttagtagccagctccaaagtgagtagtgttctgtaacactgaggaaattgacctgtagtcctagccaaagggaaagttagaaaattatttgaatagagaacttttattttcctccaaaggggaggggagaaggcctcagaacatataaacagctgacaaatgcttgattgaaacactggagtctatagtaaggcaacaattaatgtattgttcagagtgaaactcttatttttcttccttctcttgtcacaagctcttccttggtagcctaggctggccttgaattcatgatggagcccagaatggcttacaactttgatttggtgtcatgagtgttgggattgcaggtgtgcaccctcattccaggttggctggaacacttgagaacaaaatggggtgctttccatggttgagaggacacaggctactgacctgggcaagcaaaggtgactggtaaatactacctaggaagtatgtgttttcttcagtgctgggcattgagcccaggcttcatcagcatgtagtcccacctcagcctatcataaagggctttgatgtgtaattgtgctttgcacaccttgaactgagccttcagtaccagactcatttgtatgtgagagccaggaagcaactagaggctgaccagagggtgaagtagtaagatgaatcactggaggagtgatgacaagtgatgctgatcctgggtttctgtgctggggcagttagagcatgatggggcttgtggctaagtgggtggtatgtttctcatttagagggaccgagtttcctcagttggtgctgattgttgccatctggaaatctaggccgagaattgccagactttttcacaagcttagaatctaggggtttatgtgaaatttaccagtatgtgatttaaattaaaactaatacaaagcagtcttgattgtagaccagattcacttgttgggctcagctttcaatttccagtgcagaaagttaaaggaacgcgttcagctgctagtagagtttgggttttaggtaggaccttcttaagatccatgaaggcagtgtttctcaaccttccaaactaacactgtgaccctttaatgcagttcttcatgttgtcgtgacctcccttccagtcattaaattttttagttgctactttataactgtaattttgctactgttatgaattgtatgtgatgaatggccccaaataggtttcaacccacaggttaagaaccactaaatgaatgaatggctgggcttagggctgagtgatggagtgcgtccagtttgaaatgtcattagaaagtgtactggtgcgggacgatggtggtggtacacacctttaatccccttacttaggaagtagaggcaggtggatgtctgagtttgagaccagcctggtctacaaaatgagttccaggacagccagtgctgttacacagagaaatcctgtctcgggggggggggggggtaatactggctatttttatgtcagctcgaccgacacaagctcaagtcacctgagaacctcaattaagaaaatgcctccataagattgggcttctggcaagcctgtagggtattttctcaattagtcattgatgggagggggcccagaccactgtaggtggtgccatctctgggatggtattcctgagttcattaagaaagcaggctgagcaagccatgggagcaagccagtaagcagcacccctcaatggcctcagtaacagctcctgcctccaggttcctgccctgtttgagttcctgtattgcttccttcggtgatggactactatgtgaagtgaaagccaaataaaccctttcctcccaacttgcttttctggtcatggcgtttcatcacagcaatagaacctctaacaaagtcagaaagtgtccctccagtgaggtcatctgaatgtcagcacagctaatggtcactagttgtctttttgcagtaactgggcacagagaatactgtgtgagaatgccattgttgtttccagataaaatacagggcctgctctctctgttgccactcttatatcccttccccttcctttgctccctgggtttcatctatgcagttcttgagacttggcctgttctttcctgactccttttgtgacttcatggttttaagcagtacacctgggattcatttctatagtgccctctctctctctctctctctctctctctctctctctctctctctctctctctgtgtgtgtgtgtgtgtgtgtatgtgttgtgtgttgtgtgtacacatggatgtgcacatacaagggccaaggtgtcttctagtactcttagccttattcctttgagtcagggtctctctccgaacctggagtttatccctccccatcccaagttgacagccagcaagcaccagcaatctttctgcctcaacactctgtctctgtgctggagttgcagattcatagcaagaccatatcaatcttgtcacacaggtactggcatccaaactcacatcgtcatggttgttctgtaagcactcttacccaccgagccgtctctccagcccccatcattagcctttggattgcacggtagctttgagcacagcatttatcatctgcttggtggtaggcacggctcttctcatagcatgtggttcctggagttcacaactaagagctccacatttcatgagttctgagcacttgctcggttttgaatcatctcagcaaccctcacagcagcctcctgagtcaggaatgctgaagagcgaggcacaaaggtgctgaaccccaaccaaccgcaggatatcaagtcctggccccctgcctctacatgtcacatcttaaccaacaagctgctacatctttcagaatatgctcggggatgtgtgatgagtgagtgagtgagtgagtgagtgagtgagtgagtgagtgagaaagtaagcatggggaggatgaagcgtgccagtgtcacaaaggaggggttagctcttacttgccatcagtgttgagcctctggctctgtgaatttgcctcactgaagaactagggagagctacaccacagttccattctgcactgaagtgatgttagcagggtttgaaggcgccttatgaacatagaatgtagagtcagtgtgtgtggggcggcgggtgggcccaaggataaactcaacttgagtgactgcttcagaaaccagaagaacattctttctttaatagaaattgttgcacctaagccacactagtcttttatattctagttgtttgatctctggggcaaagatctgactgagggaatttggaggatgtctacttaactaatagatctggtttttttttggagggaggtatcagatttctttctttttttttctttctttctgtttttttttttttttttttttaaattgaagctgactccatcatgagcctgttttgatggaattcgatggctgctaagaaattaagctagatactgtgtgcagaccctgcagcctgccctggcttgctactcagcagctgagtcaccttgagcaagcttcttaacccttgtttctccatttcctcatcttcaatgatgcaaataacattgccggcctggtagcatcatgagaggatcataagccaaccctcactaaccactgagcttgcacttggcatataatacacactcattaatgatggtcactgtcagaattgaggttcactgttgtcaagtaagtatgtggtaaggagtcctccattcaggcaggaactctccagcagccagaaccaggtctcctcacctgcagcccttttcagtttgtcttataattggcatgtttgacaatgggtggggttctgggccccagctcagtacagagcaggggagctgttgtctcatgcctgggaggcacctggccagtagggttttgcgacactccagttctttgtctagaaagccatggcagatgcaactcttaaagttctgggtttcttttcagctctgacagtgggcttataatctctgccatggtatttcactgaaacaaaaaaacaaaaagggtagaatttatgaaggtttctatgttaaaaccaggcgtaagtctttagctatgggaatttaaaccactcatggcttctctctggtcctgtttctgaaacattgtctaatatatgcttgctcgtctaatccatgtgagatccttatttttattttaaatatgcagtttgaataggctctgtaagggtaaatttctgttatttatttgatctatcacgctcccatcttttttggggggcaggggcagaggcacaggtatcatgtagcctaagttggactcaaacacactgtgtagccaagaataactttgaatttccgatcttcttgccttcacctcgaaagtgatatcaagtccagtttatgtggtattggcaatcaaaccttaggttttgtacatgctaggtgagcagtctaccttttggtttgtgtccccgatcccaaccttttgaaaaagagatggctcataagagaacattattccagcagaatctgagctgatgatcttttccagtaattttcaaaactttcctttggctcacaaaaaaaaaagaaaggaaggaaggaagaaagaaaaagaaagaaagaaagaaagaaagaaagaaagaaagaaaggaaaatcagattaaaggataggctgactaggtgtgggcctcctaggactggttttagcttgtctagggcctgttgggatgttccctacagaaatgccactcccacaaaacagtttgaaccaaatgctggaaattccagacttcttagcaaatgaacataaaacgtaaaaagaaatttctagtttaaatccaggatagtcatttttaagggaagttgttacttgattaaaaaaatattgattattttgaagtattcatttcaaatagtaaaatatatttgtgcccatgtgggtgcagagttagtcagtgccctgctgttactctccatcttattccctccagaaggctctctctctctctctctctctctctctctctctctctgaaatttaaaataaagttatttttatacaatatactttaatcatggtttccccgcctctcctctccttccagactctccccaactctccactcttcccactctatatcttctttctctttcaagaaaacagacaattaacaaggcagacaagaaaagtaaaacaaacaaaaataactaagagcaggagaaatgcatggatacatgtgtgtatgcaaacacacacacacacacacacacacacaccataaaaactcaaaattggaaaccatagcatgcaagcaaaagaccagtgaggttaagaaataaatgcccaaacaaggcaatataaggcaagaaaatctctgaaaatacctttgagttcattttgtgctggcatatacagctgggcatgggatctatccctaagtgtggtttctctacctagagactcccttggagaccttgaattttttctttgtgagcagctgttaattggagatagcatcttggttaggaacagttggcctgtctggtttgaacctgtacaggccctgtggagcagctctgttgtgtctggaagatactgtttccttggtatcacccatgccctctggctcttagcatctttcaacttctcttccacatagttccttgagccccgagagacagggtctcttactgaacctgcagctcactagtttttagttagctggtggctcgaaagccccagcaatcctcctgtctctccccaccacctgagctttggggtgatagggtttaccttttacacaggtttggggggggggggggctgagttcaagtcctcatgtttacacttaaagaccttttacccagtggataatctccccagctcttgaagacatctttatccacagcaggtattttaatttgaataacccattgattattttgagcatctactgccatgtggtaggtgccatagattagtgatcagggaagactcacaagggtaatttaagtagagacttaaacggtgagaaaagtctatcaggtggagttaagaatacctaggaagaggaagctagaacttggtggggtggtagcctgaggggagggctccactagagggtttctgatttatcctatagggaactgctctgctcttttatactgttacatttgatcactaataagtggctttggttggcattatcctcctggtttccaactagtctgcttggagctaatttgctggtctagagccattaccaatcccaaataaagggatacttagtaggaccattaaaaagtgagccagtggttatgtagagagtttgaggccagcctgggatacataagccattctccataaacatcaaacaaacaaaaacagaaaagcaaaactctgcattgtctgttagaagaagtggactgtatatggtataacaccaggtcagcctgtatttttactgcctcactgagtgactcagaatgcctttcttacttcggactgggaggaaggcccgtcagatatcccactcagtggctgctgggagcacagctcttgtttggtgagtgagagctctgtaaacacatgacgggagagcaggagaggaagtttaggaggtcaggatccacgtcttcacattccaggagcgtttttgtctagtgaagccagaacatgttcaagccagaagggacctccaggactaactcaactcctcatcttgtgaggtcaggatgttggcaagtggtgggccatggcgggtcccactcaccagcagccctatgagggcttgagttttctatttggtgagggctatttgggaacatggctgtggaaaatggaggcttgtggccttagtctcctatcctgatttggcgctttgaagaaccagcttatggagacaacctgtggtctgcaacatcttctactagctcccactataggggcttccaagaggaagccagagccctttgggcactgggagtctggagatgtaccactctgccagtaggttcctgtccagggaggcttttttttttctctctttttattattattattattattattaattcaagttagagaacaggcnnnnnnnnnnnnnnnnnnnnnnnnnnnnnnnnnnnnnnnnnnnnnnnnnnnnnnnnnnnnnnnnnnnnnnnnnnnnnnnnnnnnnnnnnnnnnnnnnnnnctcccctcacccccattccttctcccccacctccaacctaccccccaccccatccacccaccactccccaggcagggtagggcccccaacaggggctccaccaagtccaccaaatcttcctgtgctgggcctaggcccctccccatgtgtccagagacagagtgcatcccttcaagtgggatgggctctcaaagtcccccccacacaccagggcaaaacgccagtccacctccggaggctcccaggagtgcaggggcccagggaggccttttaataccatacagtcatggactggcacaggggtgacgaaagtagttaatagtcaatagcagttactctgagaccagtgctgcttccaaatgagtgctattcattatgccagcatctgtgctcacttgagaaaccattgaaggtctgtgtggggcacatttactctgttcacaggaaatcctcagcaggcagttggacttaaggacctgtgacggtgactaaccggctaccccaggcatctgtggtccacaaatttagaactactggtctggaagcatcagctttcacaaaatcagccacctatagagaaggactcttaaccatggccaacttcctggtgcaaacccatactaccatatttaaaattatctttattatttgctttttttttcttgtaaaagtagctcaagctcattgtaaagaaactaacatgttactgaaatgtgtagctgtgagcaattccagttttgcctgtgtttataatttataacatatgctaagattttacagaaatagaagttactgtacacaatgttctctaactgtgcaagttttaaaaatgtgttgttacaggagagtgggccctgcaccctgtctgagcagcacaccggagctgaccctgttgtcagggacacaggggagctggccctgagggcataagagcaggagagccaccccacccccccccgcccccgtatcatatgccccaacagcaatcaggagagagggccctacaccttgcctgagcaaaacaatagagctggccctggtggtgtgtgtacaggtgagccagatctgaggccctgagagcaggagaactggccctactccttgctgcaggctgcatcgggtgagctagctgaggcagtgctggagaacttgccccaggaagtgagggcaagagaaagctggggggttgaccagaccggctgccactcaggctcagaaccagggctatgagttagcccactctggcatccactttatctatgaactgctggagcgtgtgaaagggaacaatctacagatccaatactgaaaaatctccatgacacaggacaacaggatatccaagaggagtcctagtgagagccattatcaatagtgtagcagaagccagaggcctcaaaccagaccattgactcatagcagtgaacacttgcaagatgtatggactaaagcgtaaactgtgtgactcaccgggccacactacagcttgcttccttctccttctccttctccttctccttctccttctccttctcctccttccccttcttcctcttcctcttcctcctcctccttctcttccttcatcttcatcttctttatcgttctctttttctcttctgtttgtctggcttttttgggttttctttaaattgtattttgttttgtggtgagaggttgcaagggcagagggttcgaggggacagggagatgagtgggattgggatgcatgatgtgaaatccacaaagaatcagtaaaaacaaccacagccaccataacaaaacaaacaaacaaacaaacaacgtgttggtgacttattttgaggtcagagtattagagtgaggctcagggttgagtctgcagcgggctagctgagtggctagtcatgtactaattgggtgaccctggggaggtcatcagactttctgagcctcagtttctggtgttcattctcctttctcatagttgttttaaggagacaatgaggtgatatacaggaaaggactgagtaacagattgcatgaacatgaaggattgctgccagttaaattatgattttagcatggtttcttgggcacttctgtccctgctctttctttttctttctttcatccttgcagagtcttcttatatatcccaggctgccttcaaactcactacatagctcaggctagcctcaaattttctcctgcttcaacttcccgggagctggggtcataggtgtgtgccaccgtgccaagctgtcctttttccatgctttgatctttcttagtgaatacttaacccgatggtatttactccttggtttccctgaagacaaatagtagctaatgtgctttcccctctgttgccaggtcactcccggaagcaaggctgctatagctaatttatgtattggagatttaatcacagccatcgatggagaagataccagcagtatgacacacttggaagctcagaacaaaatcaagggctgtacagacaacatgacactcaccgtatccaggtgaggctgtggaagggttagttcattcctgatggactggaagctgttgtggacagcatctgcctcccccatcccagaagcccgggtgcttccccggctctgtgctatgcgtgatggaagcactccggaaggcctgtggcttcggactttgaggttgctcctttcttctgtgattttcctaggacttctcgtcatctagacctctttctcttacacttcacttgatctaacacagctaacgaagatcctgagaaggtaaaacaagctaaacactgggttggaccctgaatagtgggtgtcttgtcatgagatcacagcagcaggggaggacctgagcctgttagacaaagtgccaagtgcagcttcaggtgcactccaagaaaggagtacaggcactgagcaggcaggtgagggaagcccccttggaggctgtaattagggtagaatttccattcttctttcacatggtcttggaattggctgcacaaagccaagatgtcaggagtgattggctcaactctgagtggcttcctagttcctgttggatcaagttcaggtcctttttgctgtgtaagcctgctttatttaatggctcactaaccgtagcttgtatagctcttcctaaggttctcatctgtgaagtacacttggtaacccgttttctcctacttgtgctattggattgatagacagaccaggagtggatgagaaatgctggaatattttgttccttttggagctctgcttactctgtgggaggcaaaccatttcattacagccttttgttcttgtctcttgttctctctcagcccatgtcatctccctcaaactcatgttcaggtcattcatgcatttattagtaggttctgtcactggttactgtgatggatacaaagtaaagtataaatgttctctgccttgaagagagaaaaggccctatgctaatgaaaactgaaactggactaagaccattgctctgtgattggcaggaagagatcctttgcaaaaccgaaaaaagggttccttgattgataagtatgttggtgatatggtccaggctaagaacactgagccaacatacagttgaagtctacaccatcctgaatggaggtggcagcatgaggcagatctagccactcagaggagcctggtggccatgtcaattccccacactgtagcgagcgagtttgaggctagatcagaagggtcccttaaggctcttgtaggagctgtccaacatggataccatctaactgacaaatagagggttggtctgatggcagggtacaagttcagagggtaaaagttaaggaaaagggaacatttttctaatttgcttttagcttgtacagttgcttcttggtgcctggggggtcagtccccagaattgttgtggatgtcaaaatgtgtgagtacccaagtctcttctgacattctctccatgggcatcgtcctacatgctctgataggcttcgtcctgcattctttatgtcgcctctggattacctgtgatacaaagtaaatgcacagatacagagttgtctgtctgcaactgaatgactaagcagaacctgcagatacagaggttgaacttagttctttatttcacatgaatgaaacagcaagcggctttaggctgggggtgttgctcggtggtagagccctggcttgacacgtgtgccatgttgagtttgattatcagcactgcaaaacagaatgaagtgaaaccaaataaaaggaaacaccagctttgttcatttgttgcaggtctgagcaaaaaatttggtctcctttggtgagtgaggaggggaaacgtcatccatacaagatgaatttagcatcagaaccccaagtaagtgcttatctttgtccctcctctgccagctgctttcctgcttgggcattgttcccctagtcccttgtttttcctgcactggaggcctggggatcaagtggctgggagagcctcccactgtctttgctctgggatctggctcaagttcagttcttcccgtaagggaactgccggaggaaaggtctggaaaaccccagggcaagaacatgccctgggctggaagctaggagtagaggcaggcaatgagagaagagggcagaagccatcctgcaagtagcggtggtaggactctagtgaatcggagagctaattcggctcttatagcatttagacacaaaagaatcatccagcgatgatgatgcgtttaggtccgaagcagttatagaaacagagggggatttaatagtaaacccttttttccctgtgaatcctgaggtgggaatctgttgttcttgttacagtgaaacttgaagatagatattaaataaaattagttaaaatgaggttgcggttaatctttaaaaacatatagtaaggagtcactgcattgctcgttgttcaaatagaattttctggaacagtggattgtcctgagaccccatgtttataaataaatctcccagtagatggctgcttgtaggtgttttctttcacttctcccttagttgcatcttctaaggtatctgcacggtgtgggtatgttttgaaataaatagagaaatatttaggacatcttggtaaaattcctcatgttgctcataacaaagtatgttctctgttggataaatgaattatcaataagtgaggggccgaaggaagtggcttatggcgtgagtgcttttatacaagcacaaggacctgagtttgaatttccagcacctgtgtatcaaagctggtcaagactgtggccatctgcaacgccgtcaatgagagctggtccgccaggtcagccggaggctaaggttcaggttcattgaaagaccctgtgtctaaaatggggagaggtgatggaggagacatcacatatcaccctccagcctccacacacactcgcaggggtgagtgcacctgcatgcacataccacaagccaaaaaaagtgagtaagtaaactcatacttttttcaattttcaataagatctgaaattggatttttcttttctaagtttgagacattagtttttataaagaaatagcaatcaaaaattaatacatactcagctatcttatgcatagtatagtacatataattcatatgaaactgaattcccatggtgccttggtgtgtataaattgaatggttgatgacaagtctttatttcttaaaggggttccattaaaattttggaaatgtagttacagttttttctattaatgcattggcaatcatacttaaaatgccgagtcgttttgaggattgttttgcctctgccatgtcgaaactgatgcgaacatgttgttctgtgtaagccctataaggaaattcataaaatgttattctgcagactgctagttgtataaacaaatttaaatcatgccagagttaatttcagtttccctggtagtctagccacttattaaatttactgtacgtgttaaattttgatgtgtcaagttttcgtatgatttttgtttaacttggtcccaaatgctcatttttcacttgaggtaattattattcatatctttattatacttttccttcaatgctgatgttctgaagatcattttcagactaaaaaaaatactattcaaattactataaaggccagcttgagtgtagttttgtctttattcatagaaaaatcttcccacctcccacttcttttcttaaccagacaaatagaacagagttcatggatattaaaaagatctgctagttcacataaagctaaccaacaccccagcttatctgaggtcaacatagttacatacctagtttgtatttcctcattattgagtttccttggagactgataaatacaaagcccaaacaattacatcatcccttccacaaggcaagccctaaatccgcctgtcctctgcaaagactagactccacatggggggagagatgtttcttttatgtacaaaccagacacattcttgaaagttgctttataaagcaagaatcaagaattaaaaaagaaaaagctgtcccaaagaaaaagctccaccactcccacaaaagcaaacgggggtggggggtggggaggttctggagatgactcctgcctgaggacccgagtttgatccttgggagtcacataatggaaggtgagaactgattctcttaagttgtcctctgattcataaatgtgggtagtatataaataaataagaatttatgacatggctctcccatggacttctgttctgaccgggactgtttttgtttctatggggagagaaatcaggccctaatgagaacctgcctgccgggttccgcactgtgcttggcgcatggacgagtcacaccaccaccttctgaaggagcctagagaaaggggctcagagaggcataacttgtccacagccaaacacaaagtgtcaggggaaatttgagccaagactaaggaataagcatcttgtgctgctcccagaattgctgtggaaacagaaggatgcatgctggattcagtcatgtttcccgagctgccctagtgatggggtgagagccccaggcgtcttctgtaaaccagctgctgccttcacagccaatggtttcaggattcctttgagtcagtgtacataaaactgcgtaaccattccttgactagggccattttttctttaatatcctcttttgtgattatttatggtcaggcttggtggcataaacaggtggatatccgtgagtttgaagccatcctggtctacatagtgagtttcagcgacagggctgcatagagagaccccgtctcgaaacaaaatagaaatagaaaacaaaaagcatacaagcctcttttgattatttgtacagatatggacaaagtcaattaaacttcactgattctgacttgaagagaaaatttactggaatgatgaaaaagacagacataaaaatatgtctatgctgccttttactttaaattagctttgtaatgaattaaacttttagttttcattcataatgttttccaattaaacactgaagtttcttttttaaaaggaggaaaaaagagtaatagagggcctggagaattcttttcatttattggggtgtttaagaaagaaagcagggtttagaagagttttcttgggaactcaggaaacatgctgagtttaggaagttccaaagagctttcagcactggaagctggattgattttgagcattggatcagggagaaccttgctaactgactcatcagataatctgtgattattttttaaagcaatgttagttaaatagttcagttgggtgctggcggtgtacacctttaattccagcactcgggaggcggaggcaggtgaatctctgagtttgagtccggcctggtctacagatggagttctagaacagccagggttatatagagaaaccctgtcttgaactgcatccccaccctacccccagaaaaaaagtgcttcggtgtgtttgtatagatgccttaagagcttgttgttgtaattgttcaccagacttctggagatgtttccacgttaaggagagaagggcatggagacccagaaacccaaaagtcctccctccacaggttctgccttcgacccggcttctagaaccttccactttgtgttcccacagagaacaataggccctccgcccctcctcctcctcctgtgcaaggactgagactatatagtcagcagctgtttctcccgtgttcccaacaccctctttctgtgatgacctaacctggggaatttatctacaccttctggcattgagggctttgtgatgacctaagccacctctcctcttcctaatgcctctggaatgtgtcctgaaaggatgcctcttcagctctgacttgggttctggtagcccaaggcatgaggcgtcatcctcccagaggtccccagagatcagatctgctgggttttggggaagaagcaatgatggggctgattgagagtgcatctgtgggtactctcaggccattggtagctgtctccttgtgtttgcctgagcccctctacccccagctgaagatagatttgaaccagggctgctgtagcttagctggaagttttccctggcttttagcctatactgcacatgatacggggactgggtggacgcctccctgaattctcctctgctccctgccttcaggaggtcctgcacataggaagtgcccacaaccgaagcgcgatgccatttactgcctcacctgcccccagcagtgccccccggatcatcacaaaccagtacaacaaccccactggcctctactctcctgaaaacatctccagcttcaacagtgccgtggagtcgaagacagcaggcagcggggaggaggcgaagagcagacagtaagtagaccctcaaccccccctccaggctagtcctgggagaggcctttcccactagtttcttctagcaagttgaaccactcactcatcctgggagggaaccttttgtagtcgacttgttcacaagtgaaaagggctccccctctccctcttggtggggtcgtagtaaaaataagaacatgcgttgctggagctgtggcttaaaggttgtcgtgctggctgctcaagcccgaggatcagggttctgttcctagagcatgtgtaaatgctaggtgggcttggtggccggtctgtcatgccagcacttagaggagcagaccagggatctggagcaagcaggctggccagactagcctcacgaatgagctctgggttcgatgaacaagatgaggaacagtggaggaagattcctggcatcaccctgcagcctccacacttgcgtgagcgcctgtgtacacacactggccacacactcacaggagaggaaaaaaaaaaaaaaaaatatatatatatatatatatatatatatatatatatatatatatattgcccagctctgtgtctgacacacatagatcttgtaatgattgggaatcggccttgctctgaatgctgtggtcactcaccctcagcagctggatgtgggctttcacagggctgttgtgtcctgacagagtcctcattgtagaatccttgagaggatgactcctcaagatggtctagtttgtgtccacgtttcccacccgatctgagcagggggaggagccccagaatgggcagtggtgaaacagtgcttcccttctcaccagagcagactagaaatgatagagggaaatccttgaggctgtaagtgctcacccataggattgggttctgacctgggaagggaagagatgggactgtgggtggaaccaggcaggtaccttgctttgtcacagatctgttggctgaacctctctttatctctgtcttccagcagcacaggggcctactgtctgctctagggggcagatttagacacttcagccgcccagggcaagggaactggttgtgaaggtgtcaagttaggagggtggggagtagattaagagttgccaactcatacgcctgagggtgggccggcagggtgaggagcaaagggcggtgctaccagatcaaatataactgaattgcactgtgacgccctatgctcatgccctgcccatggggcaggcctagaatccccacctctgctgcttactttcactgaaacccaagttggaattttttttaaacctgaaattgccaacttttaaatattggtgacgttcaaattttgttggaaagcatagtacattccaacgttgtctgatctctcaactccaaaagcccatgttggcattcaggttttttctctcttcacctttataatctgtccagattctttagttgtaaactaactgtttcaaacacaagttaggaggggttacagtcccaggcttcttaactgtttggagagctgctccaggaaccccattgtcttcaggggaccagaaggaggggtgggaaagagaggaaaggagggaaggaggaggcagaccagaaagatactaaggctgttgggcatcctctgcatgcgagtctctgttcctgatactcaggacaggataggacagagccagtatgttccttagagcccagtgaggttttggtttcagaagatgctgatgatcactggcataatggcagtggccagtaccactgcttcctccccaaatcatggttccttcgaagccttacctacttgacacattgatgcccttcaaggtgctcataggatgttggggttacatgagaaaactacacagggggtccccaaagcatcactccctgaagggaagcttgcatgtagcccagtgagtagtggtttgaataccaagggccaccattcctgtgtttcaagtgcttggagaggctgggaacgtgacccttctttactgtcccagagtggaatgttccatgatctggatttaataacccaggaaatgacacatccttaattgaaagaactgctatgtactgggagaagtatgtgcctggaaagtatttttagtgtggctgcattagatatttttcctttgttaatgtcttctttcttctttcctcttgcttcctgattgccccctgccccccactgctcctgtcacagtctctttggctgtagcttcctgagggtctttatcaaatctccttgagcaaaaggggcctattatctagttcagcctaacctctttgagaatgagcgtgagaaggagcgggaatccctgatgctagctagaggccaaggagctgctgagcccaccatgtttcttgtacagggacctctgcctgttggtttgtttctagaatgttctcagaaaggagagagagagacgatcctgccaacccatcagccactcagtaacccttcatgctcagcacagggcccagagctggctcacccccactgtttagtctgaatttgctgaggtccagaactggttcactacatgctttgcatctgaggtcatcacccgttccctggggctcaccctggtgttcttttttttttttttttttgtcccaagctcttcatagcattctgctgtgtgtgtggctgtctgtcttgtaggtcttggtacagctgcatcccaggcaggccaggatttcagcagctgcattgccacattgctacctgggaaggcaggtgggggtctcctcagcagaccttctggcacatagcagtaggagggagaaggaagaagaggcaggcagagggaggccctctgcagccctttgcctctaggcaacttcagctcagcagttctcttttgagtacctactgtgtgccatcccagtgacaggaatgttgctagcccctcttctctcagctcttcaattgtgtgtagaggggacctgttaacatttggtaatgcagagactgatttcataatttatgtgatgtctgtcactttctacagcttgtagattggagtcttacaatctggctctgctccaccagctgagtgaccttaggcaaaccctgtaaatcttctgaaaccttgtctcctagctttaaggtgggcccttaaccacttgcctccctaccagcttgtcaaaggaaggcagtgccttgggccagaaggtactgagtgaatgcttgtgactgctgatttcactgctgtgggagaattctgcctcagcaaacatatgagcaccttccagagaagatttgccttggcctactgtgaacttctttcttccctgagtcattgcttaagttcagctatgggtaccattggccagcatcctcctggggtgatggtttcttcatggcataagtggctgagctcctgtaaccagcataaaaatcccattgtactaggtcttccgaattgtgttcagggtattcgtctccagacacccaggaggcagacttctaagccagtgcaggggagataaagggttcattgctgtcaattcaaaaagtagcaggggattatgttagctctgcctcgatgggagcaggatcttacatgaaggctgcttgtgtctgtagctgatatgcctgcgcccagtgtctgggcctgaatgttcttcccttttctcctgatgtccatctattccttgcttcttatcataagagactaaaattcagggcacattcagaccgggcatccccttcagaaccaaatatggaaactttcccagaattccttttaaaattattttttattttaattaattatcaagtaatagtctggggcatgtgaaacccaagctcttattttctaggatatcatgaaacatgaaggatttttctgtttcagcttactcctctgtgcgtgtatttgtgtgtgtgtgtgtgtgtgtgtgtgtgtgtgtgtgtgtgtgtgtgtgttttaagacagatgtctcattccttggatgacctggaacttactaggtagaccatgctggccttgaactcatagagacctgcctctcctttgtctcttgagtgctggattaaaggcatgcggcaccatgaccatctttcatcttactgtctttttaaatttcttttgagatttatttttattctatggatgttttatctatgtgtttgtgcaccttgtgtgtacagtgccttgggagtcctgaagagggcgctggatcacttggaacagttattagtggtcatgtgggggctgggaattgaactctggtcctctggaagagtagtcagtgctctaaactgatgagccattcctctgacccctcagtttgttttccttatcccaaatttaagacgagccaagaactctgcatcacttaaagttagtacttctgtttgagacaagggattcttaaacgaattaagcctgctcttctgagatagctgcagatgtgtatgaagctgtaggaaatagtgcaaagaggtctcttattccttgtctagtttcccttgatgctgactcttgaggtgttgttcttgagacaagatcttattctgaagcccaggctgacctggaacctacagtcatcctctcagcttcctgagtttgggatgacagatgtgacccacagtgcgggactggggatgccatcttgaattgtcaagtagaagatggacaggaacacagtgtaaagaacatttgagtcagtggggcatggtggcacctccctttaatctcagcacttgggaggcagaggcagtggatctgtgtaagtcggaggccagcctgatctacatagctagttccaggatagccagctctacctgtctcaacaaaagcatttgagtctgcaccaggattcccatcctgttgctgcacccaccccagccacatccagcacgcccacgcccctccctgcacagcctccagcccaccaatctctcactgttccagctttgttagttcaagaatgttttattaacagaaccgtaaagtatgtaaccttctggggtttgctcagcacaatttcttggaaagtcttcaggttttctttatatatcaataggatgtttctttctttctccccacccgcctttttaaagtgtggcaaaaaccacatgacataaaatttactattgtaaccacatgtgctaagttatgcaacagatctgttgaatttgttcagcttgaaatgctgaaactctatacccaatgaacaacttctgtctctcccaagctcctggaagccactactgtgctttctgtcgtgggcccctcctgcaagtggagtcatgcagcatttgtcttcgttgactggcacattcatgctcctcttagcatactgctccaaagtttcacccctgtggcgtgtgtgaggactttcttccttttcaaaactgaatccagtgtttatcacattaaaaaaaaagaatccatctatctgttgatggctatttaggctcctttcatctttttaaagacaccacttaatgaggaaagcaaaaggctttcccaccaaggtggagaaggagctgaggctgtgcagtctggtcgctcttctgcattgtagctagggtaacaaggcgagggaagaatcagaatggattgctacatccagcaagaatatatcagaaaaaaaccacacaggctgtaagatggacatagaagaagcaggtgttgtttctttatgctagcagtaagcatgtggacactgacattaaatgtaccatttatagttacttcttaacagactaaactcaagtttgccaagtgagtggggagaataggtggaagggaggagaggccagttagtgtgtacagtgctattgtttgagagtcgaggctaattccggtgccatgtatcactatggagtggataaggaacagaaatccattgtgtccctcaaaataatgagactagagacttgtcagcaaactcatcataaattaatgagaaagcttaaaaaaatctccacatcacttctaggatacatgtggaagctcttgtgttaagagagactgtgagacttaaaacacatcttaatgaacttaaaacgacataacagcaagtatcttttccaagcacaatggattaaaactagaatttagcacaaagaaaaccggaaaaatgacaaatatgtggccatcgaacaacacaactggaacaagcaatgtaagaatcacagggaaagttaggagacatcctgagaaacgggaacagacaacattcctagcatttatcagggtcaggcgtggtggtggtgggtgcctggcatcccagcactccagaggccgaggcaggaggatcaggatttcacagccagcattggttacacagtgagatcttgtcnnnnnnnnnnnnnnnnnnnnnnnnnnnnnnnnnnnnnnnnnnnnnnnnnnnnnnnnnnnnnnnnnnnnnnnnnnnnnnnnnnnnnnnnnnnnnnnnnnnnttttttttttttttttttaaacatggtttttcctttttatgtttagtcttaggcatttgagttaatcgtgtgggtgtgagataaacatgggggggggttgttgatcaccatagctgtaaaaggagtttgaaatcctggagaccagttcctcccattttattcttttttgaaattgctcttaactttttctttttgttgcctcttcgtatgaacggtagaatccaattcatggacttggcacgttatatattatttctttcccttttttctaggggctgggggtgggggcagggtctcatactatagtccaggctggcattggagcccaccatgtaagacaggctgacctttgaactggtggcaatcctcctgcctcagactccaaagtgctaggaatagaggggtgtgtactcagcttctttcatctactgttctgtagtaccaagggctgaacgagggcctcctgtgtgctgagtactccccctgtgtgctgagtgctccccctgtgtgctgagtaagtgttcttcctgtgtgctgaggaagtgctcccccactgagctacacacctagccctcttctaccttttattttgagacagggtctcacaaggcagctgtccttggcttactaaggagactaagcgagccttgcacttttgatccttctgtctcagcctcctgtgtactcaaaaaatttttttttcttgtgaatctgctgatgtggtcaaaagattaacaccttgactcatttttgaatagtaaagtaagtacaggctacttggctgtgagatgtaattctttttatatattgttggattttatttgctatgaaatttacattttatgagggatactatctttttttaatactatcatctggttttgtatcagtgtggtatttacttcattaagtaatcaggaaatgctttcttctttttattacagggaagaggctatgtagagttaatctgatctctctgtctctctctgaaatatgtgaactctcggggtgtcctgtttcagcctctgactgccgagagtgcaggcctggctcattgtagaatccttatttatttacttttaatatctctctctatatataaacaggaatgttttcccccatttcttatgcatgattttatcctaattactttttcagatattactttaatattttatagcctaatgtccaagacttagaatttctgagtcttgtgctgttttttttttttttttttgaattaggttgactgttttggctagggtaatggatattgaaaatacttcataaaatgccagcatataaagatgttatcattatttggaaataaattataaatttgtctgtccctccctccttctgtgtctttgtctgtctgtctgtctgtctgtctctctctctctctctctctctctctctctctctctctctctctctctcccactctttcttccttccttggaatgattcccaaggttgtttgctggaagaatatatgatgaccttgtggtttagttctgttatttttagtgttcccttggtggcttccagacataacatacaacaaataagagaaaaattcttcccccgaacattccatgacctgatcttgattttaaaatagttctaagagtaatagggaaaagattaataaagaataatgtaatatgcttattatagggcaggttccaagctcaaaactcaaagaaataagtagctaacttaaaacacaaatggatggacttgagctgcccttgcttaaaaccactttactttacttaaactactccacactttcctacaaggagagggagagagatagacaagagtagctagatgccagcaaagggtggctgcttctacctagtcattgcaagccaaaggtggcaggagcagccagtatcaaccttgcccagcagcagcagagcttatgtcacccgaatgggccttgtttctttgttgtcagagtatggttgaagtccaagggaaacacctgcggctttatccctgtgcttgagtctttcagttggggcctgagtatggaagtgttccaggaggctgtcctagctgccctacagcttgtcttagaggagagaaaaaggagaggcagaaaaggagaggggagcagggaggggtagtaacttagaggaaattacccatggaaaacatactttttcttttgaaaatggaatgtgaaccagttgaacaatggtgggtgggaaatgagtgaacgaatgtaattgctgtaattcctttgctcctgcctgtgtcctttagggctgtggaggctgagagctcatatcccagcaactgcagcttgtgtatttgtatgagtaaatctatctgcgtgcattgcgtgcatcagttactggtaattcacctggcccttgtgcttgtctccttttgggcacagtgtccctcaggccacttctacaagttatacaagtgagagggaagagtgcctgtgggctcaggaggtgggtcccccacaagcctacatagtttcctttcagggtgagctcacaggatcagggagagcatagcaaggaggaagtgtcatctgtgcttacctgatgcccagctccgagcctgggctatacactgagctagactgaggcatttacagagagcaaggaaatctgcttgcttacctcccaggggaagtgagaaatacagaaacaaatgcgaggggagtatgcagtaggagagtgagttagagggcagcaaggggtagggacaagcagaactaccataagtcaataaatcgcctccgaggggtgcaccctgtgtgaaacagggtccctggaaatacacgagggtaacaggataggcaggagcagtgagaacaatgcctggcaggaggctggcagcttcagtcacagctctgctgaggaaaggccacgtcttcagggcctcgctcctttatgtaaaggaacatttattccaaaggagttgaactttcaaaactgtaagaatttggttctaagtcaggtgagattacatggagctacatcgtgaaactgtcttgattcatgggttggaactatgtctctgacttctggctgaaaatgaaactgttccaaggctgagcatggcagcagagggacaggttacacatctgatgggtcttgctgataggccacagtgtggcttggtcattgggggagccggaaatgtgagggctcagtagagtctccaactgaagggttacctccttccaccatcctcctgctgccaggcagcacaagtcttggcccagtgaaaaacagcctcacagtagtgcctgccttagcttgtcctggggcctgcggagtgacaggaggaaggagtgggaggcaaggcctggcttgcctggtcccgggggtctgaacctttacatagcaaagcatgtgaacttttccttctgctgcctccagctagaggcacagaggccgaagctgcattctgaatgacgaaggacgtctggaggcatgactagcattttgacatgaggaatgaagagatgagggttctgctggttcaaggaatgcatgtgcgccccccccccccaccgcaaggggacccagctgaactttagtggtcaggttgtggttgaaatttttcctcttcaaaattttctcttgacataatgttgattatgtaatttaaaaagaagggaagaattccccattcgtgggagttagcaaaaatgtaattgaattacagagactatttgggaaaatagcctcttacggtatgaaagtggtagccagttttgcctaccaggaccccttataacattgtcaagagggctggaagacatgggagaatcgatatccattctttcagtcagtgtgtgtttgcttggaagggagtgcctggtgaagctttgagcctaacttttgacccttgccctaatggatttccaaacattcttcttagctcggatcagccacatccttcaggcagcctcatcatcgacaaggaatctgaagtttacaagatgcttcaggagaagcaggagttaaacgagccccccaaacagtccacctccttcctgcttctgcaggagatcctggagtcagatgggaaaggtaaggggccccatggagactgtgtcactgctagacataggtgagcacagcccagactaggtggagagagcacagcttgttgtggaaggatgggtctccctgtgcagcctggagtttgccatcctcgccagagtcttgggttatatgagcacacaccaccacttctgccttgacattgactttttctttttaattgcaaaacatttattgaaaagaggagcaggggagagggagagaggactcaaatgcagatcagttgttgattgctgacggtagaacccatgtaatctgcatagagctctgggttctatttctagcactttgggtaaagggttactactgggttaggagtggaataggagtgttggtagtaggggatgggacaagagcgcccccctctggataatattttctggctcagtctttacttgttccagaccccctgaatgaggatgtcagtttggaggtctgggcagtttatggggcctctggcagtgaatcagtatttatctctagtatgtgactggattttgggagccctcttcatgttgagggatactctcccagcctagacactcgagggagggtctaggccctgctccaaatgatatgacagactttgaggatcccctatggaaggcctcagcctccctgaggagcagaaaggggttgggataggggtggaagggcaggggaggaggggtgggagagggaactgggattgacatgcaaaagaagcttgtttctaatttaaaattggtctaatcacaattataaaaataaaaaaggcctatttaatattattttacaagcatggttgctttgcctgcatatagtctgttcactatctacatgaagcgcctgcagaggctagaagaaagctctggttaagagcagttgtcagtcacagtttagggccggaaactgaacccaggtcctctgcaagaacaacaattgcttttaactactgagccatctctctagccctggttgtacagtattttcaaatgttttatgcgtttgtgtgtgtatgtgggtgattgccgaggcaagaatggcgttggagctcctggaattagagttacagggagtcattttgagttgccatatgggtgctgggaactgaacttggtcctctaaaagagtagctagagctcttaggcactgggtcatatctccagcccctattttatgttgttacagatttgttgtccaaaatgatggtttgataatggcattttcattcaagtatgtcacatactttgaccttattaacttctcctacccttacatacattagttagtcatatgtaccatattttctttacccagccatctgttaatggacatttaggttgactctataagttggttattgattgtgcagactgttacatgtttacatggatgacgaggtgtctgctatgctgacctaggttccttagggtatatttccacagtggtatagctggatcatatgttctatttttaattttttgaggaaccgctgtactgatgtacctagtggctgcctcagtttccattcccacagcagtatacaagggtgacttcatacaccatatccttgctagcatttgttgctgcttgtttttatacagacagccattctgagaggggtaggatgcaatctcggcacagtttaattttcatttacctgatgagcaaggatgctgagcactgtcctattgaccgtctgtactttggctcatttattgactagaagatggcgggttttgtttctggtgtttaatattttgagtttattgtatattctagatagcaatctcttgtgaacttgtaggctttatttaaacatctttgtgcctggccatctgtttcttgccacacatatattagagagctaaggttgtgagtgtggcctttgtgagagtctgttggtctgtcccttggctgttttcattcccacaccttgttccgaaggtgacagatgaggaggagcatgtggagaccgcagaaggaaaatgaatctgggtgtcttccttccccatggggcccccaggtttgctcttgctttggggcagatggcctttcattatcatcatggaggccccagggtagccacatcctcaaccctaggctagtttctgaaccatgctctaggctcagaaatcacaaagtgtgcaaaacagccatcgctgtgtctgtagtcagcactccatagttgttttagatgctggtacttcatcagcaggctccaggtcggcttcactggtccatgcgtgagttccaatgattctgctggtctcagaagacagctctccttggagatgttgcgtcccatgtatgttgaagtgctgttcaatcagacagaagtgaggtaatcttcattcagtagctgaggcatgtagcgagactgataacgggcaggaagcttttgtcttctcataactgctttgtctagcaagtcttcagactcgtcacctcctgggtaccttccatcagcaccccctgctcctgtcccggggagctgcttttgcatactgacttgatccctataatgtctactcttccataccccccttccctaagactcaggcacctagctaacattctgctgtctatactctttatttccccacagtgcatacccatagtgcttcagggacagatacctaggacaggaaacttccctgaatacacctgaatacactgggccccctcctcagtggcgtggattctgtagagggacaatttacacccctacaaaaatataatcaaagtgctgcttttgtgcagaacattgttgttttattagcagtaagtgagctagactttggttaaactctactattaggtctgcttgacaaacagcttgagatccaacctgtagggataacagctctgtcagaacacatgagaagggggcaggtgattttatcttgagtaagcaggtgaacacttcagttaaggtgggcaaagtcagcccgtctgagcccccaaataggacacagactttaccacaaaactcatctgagctcatagatgaggatctaagcacaggattgtgaatccatgtttatagcttcaagccctcctttcatcttctgccccagtaaccaaaacccatagctctcatgttcgaggttatcctaactggctactggaaccctggccatcactcttacttccaggtaccagggaggaaggaagggtgaaaaccattgtttctctgtcctctcccgttacacagctgattctaaataatcactcagaggcttaatatcaattgtaaaatgtttgggatatagctcgggcctattacttactaactagctctcacaacttaacccatttctattaatctatgtttttgtcacatggctcatggctttacctgtcctctagcatcttgcttctctggtggctggctctcgtccctcttttgattctgcccttcttcctctatattttcagtttggatttctcatctagccttattctgccttgctgtaggccaaatcagctttgttactatgcaatgtgagcaatacatattcacagcgtacagaaggattctcccacagcagaaggggccaagtttaaatggagagtctccatcagatgagccatctatctcctccccagaagttcaccactgttacgttatacacactaaccattccatgtacattttattatagatactactattccactattttatacacactaccattccacgttcattttattgactggagtttagttaacgggctgtacataattgtataatctgggctttatgattttattttattttttatttcttagactggatgctttcttgcctcaaaaccaggattttgctaaaaaaaaaaaaaaaaaaaaaaaaaaaggtgatggcacagctaatgattgctcgcatgtctcttgatgtgtgcttgtgctaaattttcacttagggaagcaggataaattctaggcaaacattcatcacatggagcaggctctctgggagagcccagaagtgtgttttcacctgaggttgaatgggcaaagcctggatcactggccactgttaataaggcactcagatgtgtgctgctatgattggaagaggcccgtggttcagagagaagtctgtgggtggaaacactggcatccagggtccacctgtgacctgccatgaggccttgagcaggttgctggtccctctgagctctagtatttgcatgcagcccatgagggcagcccagtgcaacaggactgctggaagcgctaagtgaaactttgggaaatgctcggtgtggctaggtccccgaacaatttgagcagtattggtgataaacctggaaaaccagagcaccagagcagcttgttcttcctagtgtggttcatccatcacttttcttgtgtttcatctttctctggacaaatcataacatttgtaggcaaaagaagaagcatgcatattggttttaactgtgaaatacatataacataaaattccccactgcaatcacttttaagagttcagttatcacatacatgtgtgagacactactgtcactgccatccatcctcagaactcttcatcttgtagaatagtaactgatccaattaaaccccaccttcccattctctgctctagcctctggccacttagccagaatagatagcactactatctattctaaataccttgtatgaggggaaatcatagttttccctttttgtgcaggctcattccctcagtgcaacatttatacaatctatacatgttgcagaacccatcataattactttccttaaaattttcattacatttatttatttatttatttattttcatagtgtgtttgtgtgcctgtgtgccacagtggacatatggacaacttccggaagttggttctcccccttccaccatgtgggttctggggattgttctcaggcttaacctctgaaccaccatgttggccccttcctgttcttttaaagtagaatcatagtccattgtctgatgtacctcagtttgctcattcatctgtcagttgaaggatatcttgaaggaggggaggtatggaatgagacaacatacctgaagcaaacagtggtggctggaggctccctcagatgaacaagctggggatgtagccatgctggctgctttcagggcttccgggaccctcagatgactcggagtcaggttctagagaactgccattgttaggatcctgggcattattctataggcgtagtggaaccatggaagatcacaaagcagcaaaatgagtagagaaacagctgtactttatctagatgatttttcttcctcttcagaaataaacaaatgaaacttggatgaagggtttcctggaagaagagacatttggggatatttgtagttgtatgaaatccagtaataagcaaagaggattccgatgtccagggctggatttttgagagagagaaaacaacctggagccagcaggtggcgctgtagggctgagaatgaggactgcttcagcacacaggtcctccggtgcaccaattctagtctctttccaccagaaaaggatgtggctcgtcttaccagaaaagatttcacacctctctctgcctcgtttccttctaccattctgcactttctcttgtttccgggtggttttctgctgacccagtgagcagggaagaggaaagcttatatttgagaccccagcccttgctgaggtggtcccttccgtggtctgtttgctgctccacactgtccatgtgtgcagagatgctgctctttctttctgtcagacaggacaggcaaccaagtcccttcagccagaaagtgtgggcgcctgtttgctgtgcttgaggcaggatgcctgaagcagcccccgcccttttgagatgtcttcatgtaggtctgaggttggctgagcctttcctgagctcatctacgaggatctctaaactatgctccatctcatgggttgttagatatctcgtcccaatgtgagaggacacagtattaataacagtaacctgaaggactgttgaaagtacaggatgctttaaaatactcttagtaaagacaaaatgctctccttgttctccatcagccagcaaagtgccttacactcattctcccattgtgttagcatcaggtgacacatgctatagggatactggttattggtggctcagcttggtgtggcaccccaaatcttctcgttccaggtacctggacaaggtagaggcaccaactgaggcttgctgttctcatggctcaggacagaaatgctatgggggcatgatcaagccacacatgtaaatttcacactcacatttgctcatgtctgttagccaagggcaggatttcccagccttggagctggtgacattcttggccgatgttagtgttggcacttgtgtgagttgagttttatgtgatttgtgttgtgagaactgatccaggcactgtaggggggctttctgtattgggtttaaaaatatttcctttataacaatgaaggggagagtgatctattttataaaaacggaagcggagatgccggacgttggtggcaggtaaatcccagcactcaggaggcagaggcaggcggatctttgtgagttcgaggccagcctggtctccagagcgagtgccaggataggctccaaagctacacagagaaaccctgtctcaaaaaaccaaaaaaaaaaaaaaaaaaaaagctgagaaaccacaaaaggttaagccactggcccagtaacatggagtctgatcccagggactctggctttgcttgaacatagagatttacaggtggttctgagataactcagagatactgagttttcacttcctgtctaatatgggtattttcctccctctaggggatcccaacaagccctcaggattcagaagtgttaaagctcccgtcaccaaagtggctgcttcagttggaaatgctcagaagctgcccatgtgtgacagatgtggtactggcattgtgtgagtatggacttctcctggtgctaaaggctgggcagaccacggaagtgtggaaattcctgggtgttgcatagcttggggctaagtttacagattgaccacaacatgcagaactgttgtgtcgacatgggagaggcttctggaatgctagcccttcctattcacggccagaggcatgttatggggcctctgaagaagtgccaggcctccgctctggaaggacaatacagggctcaggtgtcaggtgtcactaacgcagccccattttccctccctcctgcaggggagtgtttgtgaagctgagggaccatcaccgccaccctgaatgctatgtgtgtaccgactgtggcaccaacttgaaacagaagggccatttcttcgtagaggatcagatttactg

SEQ ID NO: 40 - DNA, 69700 bp, Cricetulus griseus
  >scaffold_51 dna:scaffold scaffold:CHOK1GS_HDv1:scaffold_51:4864782:4934481:1
  misc_feature 3590..3689: /note="n is unknown"
  misc_feature 8374..8473: /note="n is unknown"
  misc_feature 17538..17637: /note="n is unknown"
  misc_feature 24665..24764: /note="n is unknown"
  misc_feature 27957..28056: /note="n is unknown"
  misc_feature 31099..31198: /note="n is unknown"
  misc_feature 35175..35274: /note="n is unknown"
  misc_feature 40332..40431: /note="n is unknown"
  misc_feature 44284..44383: /note="n is unknown"
  misc_feature 46249..46348: /note="n is unknown"
  misc_feature 52537..52636: /note="n is unknown"
  misc_feature 62789..62888: /note="n is unknown"
  misc_feature 67899..67998: /note="n is unknown"
gcagagtagagggagtaagagagaagaggaacaggggtaatggctgaccaccatggccggtcgccatagagaggcagagagagcatgtaggtgggagaagagagagagaagcagcagcagagagagaggagagagagtaaagagagcgagcagcagggaagttggaagttttaaagggaagactgcacatgcccactgaggttccacgcatgcccagagtctcacccaggcagtaatgcatggtgggtgatgtggtgatgacatagcatgttttcctgtgcgtgccctgactgttgttgggcggggtctgtctcttaaagagatattgccgatcagcattaaagcctgaacctttcgaaagtatttcgtttggcaagcttgcagaagctcagcatttttttttttccacaaaattcaatggggaacatgaagggagatataaacagttttaaaaccaatattatacactgtgtaattaacttcgtaaggagtgtttgttatgatagttctggatttacctcttatagatacattctataagttatgttcctcgagagcaccctgacaaacagtgatatacggtgataagacggacaggatgcaggtaaaggggggacctgtaagtcatgaaaaagttatgaagaaaattgcttttctagtctcagctctgccatagggtattcttattttgtgatgaacaatttaatagaaaatgcaattgacagtgaaaaactaaaaccataactaatgatccaggtcttcagaatggctattccagctgtgtggaagtgcaatgagacagatatttgcaggacctggtaagtgtttgagtagctaatagaatgtaccacacttgtggattttgcctttttaaagtccctgctcactcagttaggggccgattctagacctgaagttgtaagaatggttgaccctggccaagtctgtgtggttcagtgtcagggcgccaggaaaattccattagggaatttctcgaggtccaaacctctggttccagtaaccaggagctcaggtatgcattgaattggggatgcttgctgctttgcttttgaatagcatgtcccctagtttgcatctctgcagaactaagcatttggctaggcctgcactttggcggagggctaggtgcaagtaacaagtgaggacagagttaggaggcatatggtggaggggtctgctgggggagagggaaatggccagaggagcacgtttagattacaaccaggaaaatgctaaataaagaagagcctccagttttgcaccatggaactgagagctctctaaagatgacaagatgcttgtgtctggtctttatcaccgttgggttactaggaatttccaaggtcatgctcccccactcaggcagaacctcatgacttcccgggtttggggctgagacatgccgagccatgacagctcagtaagaacttgaagttcatagagctcctcctggccttgtccttggggtgagagcacctcatttacaacaggatgaggcctctctgacctcctatctgtgatccttggcaatctgtctttcctgagagtggccaaacagtggagtacatcagacttgaagagccactgaaagggagaagttttgttcaaggtgaaataggtgcgctggggccacagctttcaccttagacaggacggtgtggcccggtccctcaaccaagggacttcagcataaagggctgagcttctgccgttaacccaggcactttactgtgagcagggcaaagccctctctgtggacacagatatttttgttcacttgccaaagccatgtgtggccctaccagcctgagcagccggaacagccgcagcctgcgccctccacccgtcccggggtctctttcgcccttccacctcctccatcccccctcctcctcccgctagcgggggggggttgctcgccttcccgccagcccctgttgttccccccaaaccacccgcctcccgccctcccccttcccgcccgctctcagtttcccctcagtcgactggagcctccagttttggctttcactcccaccagtgaccaaagacttgaccactccaagtccagctccctgtgactaccagacatggacaccggtgtgactgaagatgggttaaatgtcactctcaccatcaggctgcttacgcatggaaaggaagatggcattatcatcggaaagaaaggagaatccctcaagaaggtgcgcgaggagagtggtgcccggatcaacatctcagaagggaattgtcctgagagaatcatcactttggctggcccgactaatgccatctcaaagcctttgctgtgatcattgacaaactggaagaggacataagcagctctatgaccaattgcacagctgccagtagacctcccgccaccttaagtacggtaggtggttcctgctgtcagtgtggctctctctttgggaaaggtggttgcaagatcaaggaaataagagacagtacagggtctcgggtccaggtggcaggggaaatgcttcccaactcacctgagcgggcaatcaccattgctggcattccgcaatccatcattgagagtgtcaaacagatctgcgaggtcatgttggagactctctcccagtcgcctcccccctcacccccaaaggcgtgaccatctcgtcctggcccaagccctcgagttctccagtcatctttgcaggtggtcaggcctataccattctaggacagtatgccattccacagccagatttgaccaagctgtgccagttggcaatgcaacagtctcattttcccatgaccatggcaacaccgggctcagtggcattggatccagctctccagaggtgaaaggctattgggcaggtttggctgcatctgttcaaactacttctcatgaactcacctttccaaatgatttgattggctgcataatcgggcgtcagggcgccaaaatcaatgagatccgtcagatgtctggggcacagatcaaaactgcaaacccaatggaaggatctactgattggcaggtcaccatcttctaatgctgggtctgctggcagcattagcctggctcagcaccttatcaatgtcaggctttcctcagagacaggtggcatggggagtggctagagccgtgcaggttcatccatgatcccttcctgctcttcaccaccacccatgatccatctgtgtagtttctaaacagtcagcgattccaggttttaaatagtttgtaaattttcagtttctacgcactttatcatccactcatgattttttaattcaaagctttttaattcctttatctgttcagcagttatgctgagatatccatatttagttttataagctttagcccttttttttttccttttttccccttttttttggttcatggatttttgtttatcaaggaaatgtaagagtggaatattaatacatttcagtttagttctgtaatgtcaggaatttttttaaaaaaattaaaagatggactggagctttttctttgtgaatagaaactggatggcacagtgacttatgtgggtgttattcctgtcttgatgttatttttatacctnnnnnnnnnnnnnnnnnnnnnnnnnnnnnnnnnnnnnnnnnnnnnnnnnnnnnnnnnnnnnnnnnnnnnnnnnnnnnnnnnnnnnnnnnnnnnnnnnnnnttctgtaatgtcaggaatttttttaaaaaaattaaaagatggactggagctttttctttgtgaatagaaactggatggcacagtgacttatgtgggtgttattcctgtcttgatgttatttttatacctttaaaccttcacagaggcctggttgggtttgaatagaattaaggtattttcttctgtttaaaaaaaaaaaaaaagccatgtctgtgggagacagaccgtggatagagaggggctcctcacctcactctgaagataaataaatgaataactaaataacaacaacaacaaaaattactggaccagggaacaaagcagcaaattttgctgccctgaaagcggtcctttaaccagtgttgtcacttaagatagttacccttcatcaacattaattgtcctagagctcaacctttatacacataaatcaagtggacaaaaaagaaaagatacttactcaaaagtggtggtgaattcttttgatcctagcactaggtaggaagagataggcagtactcagtgagtttgataccagcctggtgtagagagtgagtttcaggacagcctccagagctacagggaaaccctgtctcgagaaacaaaagcaaaaataaaacaacgccaacaacaaataaaaagaaaaaagaagagaaacttattaggagacaaataggtggtggttcttgctgtgcaccctgaatttatcagaagacagatggtcaccgaactctaccacactaccaaatctgtgggcgagtaaaactgcagaactgctcaggtccagatattattcttaggtttaggtcgcccctgtccctgggttccaattagagagctgcaaatttcaaaagggtttggaaaaactaaatctgagtcgtccctccttttatatcccaagaaatagactttctgtaaaatcacatacaatttttacagacaaatacattttatgtgttgctttctttaaaaattaaggtttctcagttttgtaactaattagtgaaccttaagtcaagtccttttggcccttcctgggctgataaatttaagattatcatgaaatccagggaaagtagacaggtctacaggtggtgacacttggcctctgtgaagaggtcacctggggagctccctgagagcctcctccacgttcttgtccacaccgcggcttccagtcagggcctggttccttgtggcttgaatctgagacgcagatcccgccgtggtgagcgcttgtttgcccagcccaggagatgatggactgtggtcatttgttcctgtgtgaggagcctgaggacgggaccgtgttgtgagagggaaagcaagtctgtcccctccccacttgcattgtatgtcgacgtcgtggcccatgtgttggcgacgtttgcgagtgttttgttgtgttgtttgagcaagtgagtgttgaagagggagcaggtttgtgaggtgtttgttgtgtttgtcgggagtcctggaggccgttgtgagtcggtgtgtttgttgtaaggtccgtcagggggcggtgaggtgttggtctgaagttttctccgaaggaggagtataggctgagcgtgttacgtcatcccaaagcggcttgaagtaggaagctgtgggtgtgttgtatcgctggctctggtggcgcaggccggtagtatttgctgaatgaggcagaggcaggtgggtctgagttcgaggccagcctggactaccacttttccttccccaacacagaagcttagttcacttctgtgactcttggcttttatctgattccggagttactttcattggtagcgaccaagcgttctataaatatttcttttttaactaacgcggagttatggcaggatcacctctctccgggataccgttaatttccttcttctttttttctttaatttttttttcatgcatatacatttattaaaacaggatttctttgataattaattgggcccacaggaactgttaaagagtaagctaatactattttgctatagccatagtttgagactgatcttctgtgttattcaatagacgcttctgtattactcagatggttgcgaatttattttttcatctttagagagctctcagttccatgttgtagaactagagtcatttcttttctttacatatatatatatatatgaattacaaacaagattgaattacatgacgatccaagctcccttctccctcccgtcctcccctatcacccccccccactaaaatcctacctgtcatctgtcctttcttctaatctacacctgactcaaaatttctgcttcctcatgacctctgcatccttccttttcttcccttctcactctcgtagcttcctcccccctcttcccatgttctcaatttgctcaggggatggtgaccctttccccttctccaggggacaaagtttgtctcttttagggtcttctttgcttactagtatctctgacagtgtagattggaggctgctaatcctttactctatgtctaaaatccacatatgagggagtacagatcatgtttgtctttttgtgattgggttacctcgctcagaatggtttttcgagttccatccattttcctgcaaatttcaggattccgttgtttttttctgtgagtagtactccattgtgtaaatgtaccacattttctccatccattcttgcttgaggggcatctaggctgcttccagtttctggctattacaaataatgctgctatgaacatggttgaacagatgtccttggtgtatgagtttatttccttcttttcagtacttatacttgagcaaattcaaaatgcaattcacctgagaaaattgccatgttagtgggtcatagaagagaccactgaaaccttccagggccactagctgaagggaacagagctgcagataaattaacaaaactgattgctctgtcccaggtagagagagtgtgagacagtctcataactttcatcatcagaatcgcaggatttgagaaaacaatttgcttaagcagagagactgcttgtcaaatcatcaaacaatgtggagtgtgtccacagtatctacctgtggctaatttaggggtgaatcatcgaggcctactccccaaccatctatggcaaatggatgttactcatattatagagtttggcaggttgaaatatgtacacatgacaattgacaagtattcagttttcttaatggccactccacaaactggagaagtcaccagacatgttataagtcactgtttaagatgttttgcttacatgggagtgccaaaagttataaaaacagacaatgggtctggatgctttccagcaattttgtgctcaatggaaaatagatcacaaaacaggtattccttaaaatccccaaggacagggaatagtggagcaggcccatagtgctctaaaaaggcagctgcaaagataaaaaggggagagctgtgcgcctagtctccacatgatgcgttaaaccacgcactgtttatcgtaaactttttaaatgtggatgctggtgagcaatctgctgcagacagattctcccatgccagaacttgggcaaattttgctcaggtccaatggagagatccatgtaccagacaatggaggggatgggacgccctgattatctggggtctagggcatgtctgtgttttctcacagggggagaatgaggagcactggctaccggaacggttggtgtgatgcgtggaatagagaaaaaccggattctgtgtccacaggagagggtctgaaccagctggagtgaaacactgaacctttgttcctgaaccttgaggacatctgccctacagcctgaggaagaaagtagacagacacccagttccagtttcaccatgctttccagggccccagcttccctatagactgactaatatagcatccatgtttttctttaatgctgagaagagtggcaggatctggtcagacaagaacctccacctacagaaggtgacaccggtgaaaatttgtgcttggtgtgaggtgggtgaatccacttctagtgcagacttttgaggtaggaagacacaggccttcaattcgggtcttgaggcaggaagacacattttgaacatgggccacacctgctgctggaagcctatgtgaggacgaggaagaaggaagctcttgctctttgcctgcttgctctcaccatgctaggaagtcctttcttaccctggcatagagcagtgtttcttaacctatcagtctctaagcctttggggtcacatgtcagatatcctgcctatcagatatttacattgcaattcataccagtagaaaaattacagttatgaagtagcaatgaaaataactttagggttgggagtcaccacaacatgagaaactgcgttaaagggtcacagcattaggaaggttgagaaccactgccttagagcctacatcttcgggatcccagcatctacagaagaccatctgagacacccagtctcatagattgagcaatttcaggattctgggactttctgttcatagccggccattgtaggactacctggatcacagcctgaaagtcattctaataaaacaccgtttctatatacacaaaaagatatattctatgaattctgtttctctagagcaccctgaaaaacagatatatggtgaaaaggaaggacaggatgcaggtgggggggggnnnnnnnnnnnnnnnnnnnnnnnnnnnnnnnnnnnnnnnnnnnnnnnnnnnnnnnnnnnnnnnnnnnnnnnnnnnnnnnnnnnnnnnnnnnnnnnnnnnngggggggggctgtaagtcatgaaaaagttatgaagacaattgcttttctagtctcagctctgccatagggttttcttattttgtggtgaaaacgttcataaagatgtaattgacagtacaagtctaaaaccataactaaagagccatgtcttcagaaaggctattccaactgtgtagaagtgcattgagatacatgggttttaggactcggtaagtgtttgagttgatatttgaatgtaccagacttgtggatttgtatttaaaaaatccctgagcactcagctaggagctgattctagacctgaagtcacaagagtgtgtgaccctggccaagtctatgtggtcagacagaatttgaagtccatcaagagctcatcctggccacttttctggcatgagagaaccccatttacaacaggatgaggagtctctgaactcctatctgtgatcgttggtaatctgtactttcctgagagtggccaatacagttcagtacatcacacttgaagagccactgaaagggagaagttttgttcaaggtgaaataggtgtcctggcgccccagcttcctctttggacattaattgtctagagcccaacctttatacaaagaaagtggagaaaaagaaaagatacttgctggacagtggtggtgaattcctttatcccaacagtaggtaggtagagataggtggatctgggtgagattgagaccagcctggtctagagagtgagtttcaggacagcctcaagagctacagagaaatcctgtctcgagaaacaaaagcaaaaataaaacaacaacaacaaaacaaaaacaaaaataagaaagaaaaagaaaagatactcatgaggagacaattagattgttgttcttgttggatgagggacctgtgctccctgcttttatcagaagacagacagatggtcaccaaactctaccacactacacatctgtgggcgagtaaactcctgaactgctctggtccagatattattcttggattgaggtcgcccctctccctggggtccaattagagagctgcaaatttcaaaagggtatggaaaaactaaatctgagtcgtcccttcttttatatcccaatgaatagactttctgtaaaaacatatacatttttcacagacaaatacattttccgtgttgttttccttaaaaattatggtttctcagtgttgtaactaattagtgaaccttaagtcaagtccttttggcccttactgggctgataaacttaagattatcatgaaatccagggaaagtagacaggtctacaggtggtgacacttggcctctgtgaagaggtcacctggggagctccctgagagcctcctccacgctcttgtccacaccgcggcttccggtcagggcctggttccatgtggcttgaatctgagacgcagattccgccgtggtgagcgcttgtttgcgcagcccaggagatgatggactgtggtcatttgttcctgtgtgaggagcctgaggacgggaccgtgttgtgagagggaaagcaagtctgtcccctccccacttgcattggatgtcggcgtcgtggtccatgtgttggggacgtttgcgagtgttttgttgtgttgtttgagcaagtgagtgttgaagagggagcaggtttgtgaggtgtttgttgtgtttgtcgggagtcctggaggccgttgtgagtcggtgtgtttgttgtaaggtccgtcagggggcggtgaggtgttggtctgaagttttctgcgaaggaggacgacaggttgaacgtgttacatcaaccaaaagcgacttgacttccccaacacagaagcccagttcccgtactgtgagttttctctgttgcaatcaacaacactctcagctccactctcagctcctttccccccattttgtacttttgccattgctttgttttccgtttgctgcttcttcccatgtgttttccttcttcttttcagtttttttcctcccgcctttcccctgaagtttcccttacatctttccttattcttcttcctatcttttctcttactcccggttataatttctaagacaaaaaattgtttcttttttctattttgccttgtatgagtgctcgccctgcatgtatgccggaataggggaccaggtctcattagagatgaatggagccatcttgtggttgtagggaaaggaactcaggtcctctggaagagcaacccgtgttccccagcctctgagccttctctccatccccccaagagaaaaatgtctgtgaaagaaaggatttcctcatacccaaaagatgcatattttccaacaattaaaatctttacataagataacacattaaagctggacattggtggcagaggtgtaatccagcactggggaggaagaggcaagcccatctctgagagatccaggccagcctggtctacagagccagtgtcaggataggctccatgcaacacagagaagccctgtctggaaaacccaaaaaatgaaaaaacgaataaaaaaatcactttatgttactgttttttcttagaagcccacaagtagttaaacaattttctttgtgttaattttggtgccgtaatatttgcaccccaaaccaaatatttctttttttaagtggaataattttaccactagtttcaaaagtacctaaacataccttatttaaagcacactttatatacctgggctccctaactttttgctatcacaatacaccttctctgtatggcgcattataatttataattgcttactactgatttagctaagttgtctacagttcactacaaacactgcctactccaccaaaaataaaaaaaaaattaaaaaatggacctggtggtctctgttaagacaatacttacatgaaagatactctagaggctgaaaaataggctgaagcttgggctgtggcctcaggtatggaattccttgcttccttgctcattaaaaccattgcattataacctctatcaggccacagagagaaagtcaggataagggacataaaatgtccagacctacagagcaggttctggctctactaatccaaaacgcacatttgtgaggaggtaaacatgaaacattaacaatgcacagtgatgacatctaatgagaacttagatccagtatcttgaaagttcaccaaaagattggtaattcctttttttggtagaaggagaatcggggaggggcagccatgaattaactaggtttgatttcaaggtaatgaaagaaaaatgtggtccacacagcccaacaattgcagattgtttttggtttgctgatggttctattgacataacccttgagaaatctaatcctccccacttccttcttacggtgctttcattcttcttcgagaatgaagtcatcacatgtggtaaacgtgcctcccgaatgtctgaaacagattccacagccagaccttgcaactgtgttgggttggaatattctgtcctcccatctcatttatgaaatcaccctagtcctgcaagggctggcccagacgccactcttcctgagctcttctacgagtcctgtcaaccagatggactcccttctggagcgctcggcagtgtttctattgctctgcagtgtctgcactgagtggtgttcagctgaggaacatgtctgcatcgactctatccaggtttttatttacccgattctattttaccaaaaattgaccttctaaggctcagaaaactgaactgtggagacgacaaaaatgaccccaggcatgtgatgaaaacctcactaacagtcaaggtggttgttctgatggaagctccacctcagcccctgtatccatatacccaaagcctctggaatgttctcatggaagctcctctgcatccacatacccagcagttcccttgggtttctccatatctggggggagcagctgcttggcttgcactaccagcaaaaaacaaaggaatgttgacccaagtggtggacagtcacctccccttctctgagagcagggctcaggcatcagctatggccttcccagtcactagaacttgccttttcagggcccaagtttgtaaacttttgttaattttaatttttggtccttcaaacgtaagtagttcttcccaaccatccattccagactccaggggacatcaaagagacaaatgattcctctttcttctcaaaaacacactgaccaatggcccaacagattgcccagtcatatgctaactctgttctaacaacaaagacatctccagagcctgtcttgttttctcaagacactcctgccccacagccatcccgatatccaagacacttgagagtctcagcttctggactatggaagtcatttctgcccctataaaggttgcagtgaggttcttccaatgggaattctctctcatccctcctcatggtgtgaatgtttgctcatctacccacaggccatgggatgtatggcccaaccatccctgcatgtgagtgagactgagatgacaccctcccatgtttccaccaatataaacacagtcagtcctgggtgaaggtcagccttgcctctttctctgtgccttttctggctcctttcatctgcccttataacccaacacactccttccccacgaacaccaccccctctgatggctgatatctgttgggtgaggggaaggcacaaatactgagaggaagaacaccgtggtctataaaagtagaagcaatctttattcaaacaaacaacaaacaaaaaaatcactgcaaggtacaagaagcttaacagttaactgggatcacatccagagatgagtcttctgaaactgtggcaaccggggctaatttccagcctcttcttataataaaaacaagcaccaggtgggttcaaagagcttttataacctggaggtcatgcttaaagtcacattacattttaagttttacaacttttcattataggatgttaagttaggatgtttgggaaagccagtggctgatacagtggctgtccctgagagaatacaaggcagagagcagagtcacacaggacgacggttaaaacttcagggaatacaacaagagggtcccatggaggcaatagttagaatcttactttgtctgcagtagctgcctagctgggaagctgggaggcaggagacaattgttaaaagtttacctctgtacaccgtggctgccaggatgtctgctcctaaggcaggaggtgatatatgtgtgtgtgtgtgtgtgtgtgtgtgtgtgtgagtgtgtgtgtgtgtgtgtgtgtttatgtatgcatatatatacatacattccccaaatgtgtttgggcttacaattttatatttccatactcctggacccgtctatatcctgatttacctacgctccctatgctaatcaggctctgctgttctatctcttaagttgcccattccccaaacttccactgacaggctatttctaaaactgctagctgagtcaaacaaaatacacagggtaggcgtatctaatgtaatacaaaccaagcagtcagcaaattagcactgcttagccagaccccagacttagataatcagagaggtgtggggcctgtaagaactcctattttcacaactagatgtgatgccagtggggacggctgtggctggaatccaggactagaaagcaggatgcacctgtggttattggctgaccagcaactcatggagacctcctagttgctatggcccaaaatctccccctgctttatgtatcaataaatgaaaatctataccaatacaaagcaacaaatgaaaatccataccaatacaaagtatttttgggaatttgggcatcgttcattccaaactgcttcatgctggatgggggcgctcttatggggaatcatgaaaatcacagaaacatagttaagtccttgtttttgttgaacaactctcttaagagttgacatacccattttccagtactttgcctctttaccatctgttttaggagttgaggtatccatttaccagtaccctgtctctttaccaactctcctaggagttgaggtactcactttccagtatcttgcctctttaccaactctcttaggagttgatgtacccactttccagtaccttgccactttaccaactctcttagtagttgaggtactcactttccagtatcttgtttctttaccaacagtcttagaagttaaggtacccatttacctgtgccttgcctcttaacaaactgttaggagttgaggtgtctactttccagtaccttgtttctttacgaactctgttaggtgttgaggtacgtattttccagtaccttgcttctttaacaactctcttaggagtcatatttgaaaagtgtctacaccccaacaagcctctccactaatgcagcaatgcaaatcagaacaattcaaacagagttagaaaaagcctacgtttaatggttaccacactcccagatggcttccagagaggagactggaaacaatgactggaaaaaccatgagcctgttttctggggcacagtttaaataccctgtgggagtggtcttgagcatctctggggaaggggtcatcatttggcgggctttctgagatgcaacagggtttggagagagatggggggaggcttgtgtgtaactccaccataacattccagagtctttgggtatatggatgccaggggctggggtgaagcttccaccataacagtattaaggaagacctgaccctggtacaacaaagcatagtcacgctacaaactcaaacagattcccaaaccacagagggctggacttaataacctctggaagaggctcctgtgcctttctaggagaggaatgttgctctgatgtgagtaaacctggcctaggaaaggggatgctagacagttattagaaagaataaaacacagagaaagggcagacgatgctttctggaaatccctctatgcttggggattttggaggtgcccttggcaggcccaatctttataattgtgttaactttattgcttggtccctgcttttttagctatctcactgacttcctgctttcctggcctatcacatcactggaattgtcatgcccccagagtagcagcttttatctaacctggaagcatcctcaacatgctcacaacagctttggtacccaccagccaaagagaactcctcaacactaatctctgttttaccctaccttagttggggtattttgagtaggaacctcagggcttaggcgattgagtcaggatgcactgagtgtagccccaggccataaggaatttcttagccccagagtgactgcagcaatgatgtgccttgttagtgaacacaacttctactcgaactgtaaacacagctgtggctttctggtagctacacacacacacacacacacacacacacacacacagagagagagagagagagagagagagagagaccagtccctctaagtgtgctcaaccttcatgccatggaaagattggtcccctctctatttcaataaagcactctcagcctgctggtacctagtctacctcttctctgcttcacttttcctatggtgccaatgtgctctcctatcctgttcccagacagtcactgcccattgtgtgcaaaacacaactctcacctcaaaggaaataagagtttactctggagacaaaatgagtgaccatggcccagcaatacccatttatatcacgccaattatatgttccaaggtgggaaaggagtctttatagtcacagaccaaaggaagccacacatgaagacacttttcaagcacattggtggaaacaccagagagtctgttacagcaatgtgggtggagctttgtcccaggggtcagatgctacctgatgatgctcttagccttggaagttatgggagctatctgtctgttagtacattgcaaggaaagctagtcttcggaattacctgatggttacaaaggtgagaggcagagattagcaataaacagttactgatagggctagaaatggaggactggagcgctggctcagttccaggagctctgctgctctctttgaactccatgagccccagggcaggcacaagtgcacatacgtatattcaggcgaaacactaatagcataaggtaaaataatattttaaaagagggctaaagatagttccaaactcacaggtttccaaaccctctatggtcactgctaattagccttggagcaggggctgtgaaaattgctgcttccttctagaactttcgttttcacgaggcttgaaaagggctggcaaattacatttcatcgttttcagttgttttactttaaggttgattttcataggacagtgaagcaccccatgtcatcctgccttggcagcagagaaaaatgtgtgaagttgctttaattagaaactattttgaactatgaaaatctaaaacaaccatcagttccgtgtatatatatccttttcggtaaacatttcttttacatcacactacctctccaaacttgtaattccatttctctaagaagcatactatgcgccaaaagggtggctatgtgcaggatcatccatcagagaacaaatctctggttggtgggcagagcttccaaatcagctgatttaaagccccgcccactgcattaatttgactttcttcgcttccgcaaaaaagatacgtggtgtgaagccttcatgagaatggtaactgcagcggctgtttccccagccggcctgggaggaaattgtaagtatttaatgaatcgtaagctgagctaaattaaagggagagaggggagattcatcagggagcggagctctttctacctgtcagcctgccacaggggtctagagatcggtagagactgggggtggggtgcggagcgcggcgatgcgttggcaccggtgcaattctttattattctattattctaccgcggatgttatttaaacatgtttggagaagagcaaccaacagcggacttgttatgcacgcttctcaggagtcgggaatttgagctcagctagctttcccgccagagtgaggcaatgaggaggaggtagccagagaggnnnnnnnnnnnnnnnnnnnnnnnnnnnnnnnnnnnnnnnnnnnnnnnnnnnnnnnnnnnnnnnnnnnnnnnnnnnnnnnnnnnnnnnnnnnnnnnnnnnnagtgaaagtctaaaaccataaccaaagctccgtggcttcaggatggccactctaactgtgtggaagttcagtgagatacacagggtttgggccttggcaagggttggagtgtctgtgtgatgtgctcacttgtgagtctatcatgataaagtgagtgtgtgtgtgtgtgtgtgtgtgtgtgtgtgtgtgtgtgtgtgtgtgaagctctttaggcagcaaggcttcagagaaccacttagaaaaataacagacattttgctttcataactttgcgtggctcttttgaggggcactgagcctagaaataaatgatttgataagaaatattacatactagaaatgaaatacacacaaacacacacacacttattttttagtgggggctaatagttgtagttgttccccgttcctatacccagtaccatgagactttaacaaaaggaacaaatgcaatgggcactgagggtgactgtctcttcttttatctgtctctttccagagctatgtaagagtttaggtaacactgactaactcctgttggcaaatgtttgtccatgtttagacttgtgtatgattcatcaaggtggttaaagttgacttataaaatgatatcaggaatcattactccagctatggcaggaaagctgtacaagattttatcatgttattcagaacaatctgcacctaaaagctcaggaatgatacatttctggaatgttctatgtaatattttctgaccatagttgcagttagtaactgaaactacgaagcatggggccatatggcgtctggaccttccccaaccctgttactgtcctcacttccctttagctgcagccacctacttgaggctcctcccttgggttttttctccttgttctctgcctagaatagttcccacaggtggacatatgtctcctgcacctcagtctagggcttgctgaatgccatcttcccagagatgctgagcccggcctcctgtgcacaccacagcctgtgctgctcctcctctgtatcttcctgctacagcctaagttcccagagaacaggagttttgagtgtgttttctctagagcccttcccacagtgccggcctcacagtgatcagcaagtatttactaacaacgagaatgtgggcagaatgctgcagaatgtggagaatgagtcacttacttgacaataacaaagcaacaaaaagtgcaataacagcgacagagaggaacgcaatcactccatagcagcagtgaagcttaacaggagactcagcggagatgattctcagatattttccttgacagtttttaactgtaaaagagtaataggagagtgtcgacttagaaaatttcttttcttttaaactgattactcaattaatttgctctatacctttggacactcaaaatgatgccttctataaagatgcatattacaaaccacatgaacatatatttacatacacacacatatatatattattttcattacaggaaagaagaaaaataaaccatgaatagtataaccatatattataataaaacataagacaaacatggaaataaagacttatgataatatagtagtattctatactccaacataataaaacagaataaatagttataaatggcactgtttattatgtactgtaatactataatacattaaaacaaaaaatgaacacatggattttcttgaatcaattattggagaagggacagattttctcctgagtttcccactgtggatggtcagagaagttgtcaggcaattgtttgtggcagggaaggcttgtccagtttgtcccttctatatgttttcttttctatttatttaggcagggagaagagctgcaagaatttcttgaggaagatgagataaacttagcacaaaaacccactttacaattgcctacaagtacctgaaagggcactaaaatcctttcaaagaaggccctggtccatacaggatgtccaggtggaaagaagaccagagatgctggaaacggcacttcagccaggggtcttctagttactgaactaagggtgaatggtgaaagagccagaaatgaaaggagtgagggtcacggtgaaaggcaacaacagtcagctgcattgctctccataaaaagtgttctgctgagaagggggaacagaaacattaggggaaaatcagtggaactagacctatcaacaaactaagaaaagaaggaaatagaaataacaatacacagcaaaacttgtgaatatttggcataattttcataggaactgtcccacccctacaaaaattatccactaaaaaacaaaacagtaaattcagctgcagtcttcttcattcccaagggtgcagttatgaatgctgtcccagccaccaccgggaacaggagcaggaagtctgctcactactccagggtgacttttcaaggagcaccggtcagggcaaagaaacagggtcacaagactagagaatggctcagcagttaagctcacttgctggttagtcttccagagaacacaggatcaagggcagagccagcaactaattgacaagaattggccatagagagtacaaaggacccaggatgatggatagggagagacacaggaagtggagggagagaatagagatcgtggcctttttggtctgggacatgtggagagagacatgcatgctggggagccgataaaaaggggaaggtcagctggtccttcctccacctcctctttgatctgtcaggtttcaccccaatatctgactcctgagtctttattgatattagaacaactagataaaaacaacagatgcccttccctgacctttgtgggcactaggaatgcacttaaagcagataattatgcaggcaaaaacaactcatatgcatacaattttaataataaaaaaggaaagaattcaaggtagttctaaacacataagcaactggaacactcactgttgctcatatgtcaacaattcttaagctaatttcttgttgttgtggtggtggtggttgtttgttttcctgacagggttttctctgtattgctttgcaggttgtcctggaactcactctgtagaccaggttggcctggaactcacagagatctgtctacctctacctcccaagtgctgggattaagggcatgtgccaccaacgccctacccttaaactaatttatgtctgccacagtttcacttcctggagagtggctgccctcaaaaaaaaaaaaaaaatagcaccaaattataggaaaagtcttatgaaaactaaaaagaaattagaatagtcaaaaatgaaaaagaacaggttgaattcagagatcatgctgcctaatcccatgactcatgggaacaggaataaagacagcctgatgctaccaaaaaaaaaaaaaatagacactagaacaaaacagcaggaaaacaaaaaaggactccagaaattacatcaaacactcatggtcaacagatatttcacagagatgttcggtttatagacagggaaaggctggcatcgccccagtatgtatgtgctactgaagtaacctggttttgaaggaaccggcttcccttttggcagccataatggtcgaacatgtgcttctatgaccttgtcctagaaaccagaaagtcagatgcctgtctcgtgacaaggaaccaatcagaagttagctggtggcgctatgctttatggctctgggtgtgctttacggacaagcgcacaacaatgacgtagagagcatagcaaccaccctgggagggcctatgagccataacaaccagttgaccaatcaacacagggcaagccctccaagcctggaagcacaccaatcctgagcctgtgcgtaaccctagacactcctcttacgctgccctataagatctttggggagaccttaggagccgtctttttctagccgtctgccatggcgggtgggtaaaagacccgagctaacatggggttagttcgttaaattacaataaagcctcatgcaatttgcatcaagcttccgcctccattctgtgtttggggtggccgccgtcctggactaagattctggaagcctcagctttctgagggtcttacagtttctgtctgctaaaaacaagaatcaagccagactgtaaacccaagaacaaagcttagtattgtaaagtcatttaattctttaaaaagggcagggggaggggatgtttgggaacttgtcttaggcaaaagtcatcttagattcaagagcaaagtcactgtctatataacagaaggttgatgaattagatgttgatatgactctaacgctttttttcagaaagacaaacttgtgcagacactgggaagctgtatggctgtttgtacaggaagtgtacaatatggtgatgcccccacactccccacatatagctatgaagaaagggaaacctcatttaagttttaagaaaaaggaaaaagaaacctttatgttcgtatttgggatcactgtgaaaaactgagcatgtgcaaacctgcactttcctatttctgataccactgtacctggacaaagtccctaaaccaatcagcaagttaaaggcagtgagccacagaaaactgtctccttccttcctataaattttgaaaaaaaaaaaaaaaaagccaactgccacgactcacttcctcctctcacttctgcacacatttcctgcggcttttcttaacctctttgtataagatttgatttaaggtgcttccaatcttctgggtcagatatgttcctgcctcagtggtgctgtggatacagtctctagaatctagccagtggagtatctgaggtgctgttaatggacactgcttttcctgacgagcagaatgcaaggctgtgacaattgaaagaagtcaaatgtgaagtctctgcttcagggatccattttagggcattctggaaagtaagtgtgtaaagcccggggacagagatacagggtgtctgcagccgggaacggggaagttggggtggggtgggggtctacatacactttattagctattgctttacatttatgttttgtgtatgactgttgtgtcagcatttatgtatatatgtgtactgcatgcatgcctagtgctagggaaggttctgaaaagtgtgctggatccctggaattggagttaagggtgttgggaaccaaacccagtcctcttaagagcaatacaggttcttaatggttgagtccctacatatcttgataaagaatacatgattagatgttttcaaaatacatggataatgtataccgatgaattaattttactgaacgcaaactgtaccttttacaaagtttccactgagttcaacccttgccttttgctggttcccaaccctctctcatactaataaaggaggagaaggatatggaggtctggaaggctttaagccctcaacagtggcctttgggatttaggtccacacagaactctggacctacattctttactctctggtgttcattgacagctccagagcttcttagcatgtgagcaatctggtttccccgggtcctcctcatagagcctcacattccctgtacacagtgaaccttcggaagtatctaaacctttcatattttgagtgtataggctttctcgtgatttctagttctgcattgtgcgtaaaaaaaaaaaaaaaaaaaaaaaatccttccaaatccggtctgattttaactagctctctgactgaagagcagtgttaggcgttcaaagcctgactaatttctcagaacatgtccccctggtccacccatattctcaccaaacatcaacccatcctctcttattggtgcacagtaatctgttatatatgggagtagataagttttggatcagctgttattggatatcctccaccaccaaagcaataagccaatctagctgaattaataaatccacattttatctgagcagacagaagaacctcccaggtggctctagggaaggcaggggagaagcatgactgagtgtgacaaccatgagagtgtgagcagccccagggagggactgactcttggcgggctttctgaagggaggggctgctgcttgtctggctttgtgagagagaaggttctggaattggagaagtgagactggagtgtggaatgcaccgccccagctgcagctccccaacaggaatatgtctcacagtttccccatttattcaccgatagattcaggggtgttccattgctagctaataggaacggagttacaatacacaatcagccacaaatatctctagcaggaattagaaagcaagtagacaattttactatagagtgtgtcagatctggtattaaaggacatagtaggattacttcaggtcacaataattacagtgtttctaaaactagctggggttgtttctaatattctaatatactgaccataataaacaatgaacagatgtatgaattttaatgtgccagtcaaacagttccctgctctgcccttgagcagttcagactggttcaccagtaggggcctccaccggcaggagaaaaagcttgctgggcctttgttttaagcagccagattttgtcacatctggaagtcatgtgatgaagaagccgccattttagaattcaccattttgttacttagtcatgggctgtcttacggcctacacggtatttatctaacccctaatctctcacaagttcttggcttacctgagaaacagtagtaatgttcctgagctttcttttttggtattagtcagatgaggtgaaactgttagagaggctgctaggagttccagagagtcgggtcctcagacagtagatgaggtttaagagataaagaggctgcggttagttggagaaagccgggtcctcagacagcaggtgatgaggtgagaatgttagagagatcacagagagttccagagagcctgggcctcagacagcagatgtggcaactttcacctaagtcggttgctttaacgacttaggccactgcagaggccttggctgcccttttcagcccatagagaagcctgaagaaggagaannnnnnnnnnnnnnnnnnnnnnnnnnnnnnnnnnnnnnnnnnnnnnnnnnnnnnnnnnnnnnnnnnnnnnnnnnnnnnnnnnnnnnnnnnnnnnnnnnnngcctagggtaccgagcatccgccaagaaggcccagatatgtcagaaacaggtgacctatttaggatacaagataaaggatggacggcgatggctaacggaagcccgtatgcgagccatcttagacattcccaccccacaaaatccccgccaactgagagagttcttgggaacggcaggcttctgccgcctatggatccctgggtttgccgaaatggcggctcccctctaccccctcactcggccagggattgcctttaaatgggaacagcccccaaagaaagccttcacctacatcaaaaaggctctccttgaatcaccagccctgggactaccggacttagctaagccatttgaactctttgtagacgagaaagagggctatgccaagggagtcctcgcccaaaaactggggccttggagaaggcccactgcatacctttccaagaaattggatcctgtggcaatgggatggccaccctgcctccgaatgattgccgccatagccctgctagtaaaagattctcacaagctaaccttggggcagcctttgaccatacatgcccctcatgcggttgaggcagtcatcagacagcctccagacagatggcttactaatgcccgaatgactcattaccagactatgctgttggacaaagaccgggtccacttcgggcctttggtgactctgaacccagccaccttgctccccctccctggggagcccgaggctcatgattgcttacaggtactggccgaggcccatggtacgagacccgacctgactgaccagcctctacccagcccggaccacatctggttcacggatggaagcagctttttgcatcaaggagaacagagggctggcgcggcggtcacctcagaggatcaggtcgtctgggcccaggcgctccctcctggaacctccgcgcagagggcagagctcattgcactcacgcaggctctaaagttggcagaaggtaagaggctcaccgtgtacacagacagtcgttataccttcgccactgcccacatcatggagaaatttacagacggagggggttgcttacctcagaagggaaggacattaagaacaaggaggaaatcctcgctctcctaagagctcttcatctgccctccgccttaagtatcatacattgccccggacatcaaaaaggggattctcttgaagcgaggggcaatcgaagggcagacttggcttcccgagaggcggccctggtcacagaaaccactaacctcctggctctagagcccaccaacgatcgtccctccccctcatgggactatgaacaaagagacatccagaccctagagaaattgggagccaccaaggaatcaaatggggattggacttatgaaggaaaaactgtcatcccctaccgggtaaccaagtacctagtgacatttttacataagatgacacatctgagctccaagaagatgcgggagctccttgagtgagaagaggaattcaatttccttttggggaagaatgacattttaaaacaggtaactgaacaatgtgatgcatgtgcacgagtcaacacatccagactgaagcttcctcccgggaaccgggtcagaggctaccggcccggaacacattgggagatagattttactgaggttaaaccaggtaaatacggatacaagtatctattagtttttgtagacaccttttcaggatgggttgaagccttccctactaaacatgaaacagccaagatcgttactaagaaattgcttgaagaaatttttccccgttatgggatgcctcaggtactgggaacagacaatgggcccgccttcatctcccaggtaagtcagtcagtggccaccttgttggggattgattggaaattacattgtgcttatagaccccaaagttcaggacaggtagaaaggatgaatagaacaattaaggagactttaacaaaattgtcgcttgcaactggcactagagactgggtcctcctactccccctagcactctactgcgctcgcaatacccctgggccacatgggctcacaccttttgagatcctgcatggagtacctacccctatcattaacttccttgatcaagatgtctcagattttgctaactccccttctctccaagctcatttacaggccctccaactagtacaacgggaggtctggaaaccccttgctcaagcttataaagaccagagggaccatcctaccattccccattcctaccagatcggggacaccgtctgggttcggcgtcaccggaccaagaacctcgaaccccgctggaagggaccctacatcgttttgcttaccacccccaccgcactcaaagtagacggcattgcagcttggatacatgcttctcatgtgaagccagcccgacccaccgattcagccactgcatcagaatggaccgcgcaccgcactcaaaatcctttaaagataagactctctcgtacaccctcctattgattgtttgtctgtttaccccccatgtagcaaccagccccagcccccatagggtttacaacatcacctggataatagccaacctagggtccgggaaaatagccaacctcagcactcatttagggactctacacgatacgttccctcctctctatgtcgacctatgtgacttggtagggtctggttgggatccctcggaccaggagcctttcccagggtatggatgccatcaccctgggggaaggataggaacgagaaaactagacttttatgtttgccccggccataaaccaactcatggttgtggggggccgcaggaggggtactgtgcgaactggggatgtgagaccacgggggaggcttactggaaaccctcttcctcttgggatttcattactctcaaacgaagggaaatcccagggttcgcaggaaaaggaccatggagatgtgggggtaaggcctgcgggccctgttatgacattaccaaagggcaaaatttccaaggcgccacccccggagggaaatgcaaccctctcatcctaatgttcacagatgctgggaaaagggctacttgggatggccccaaaacctggggactccgactatatcgaacagggagggatccagtcaccctattctccctgtacaggcaagttattcccctaaatcaacaatcagtcggaccaaactcagtaataacggaccagnnnnnnnnnnnnnnnnnnnnnnnnnnnnnnnnnnnnnnnnnnnnnnnnnnnnnnnnnnnnnnnnnnnnnnnnnnnnnnnnnnnnnnnnnnnnnnnnnnnnaggtactggaaaatgggtacctcaactcctaagagggttaataaagaggcaaggtactgaaaaatgggtacctcaactcctaagagagtgaataaagaaacaaggtactgaaaagtgggtatttcaactcctaagagagttggtaaagaaacaaggtactggaaaatgggtacctcaactcctaagagggttaataaagaggcaaggtactggaaaaatgggtacctcaactcctaagagagttggtaaagaggcaaggtactggaaagtgggtacctccgctcctaagagagttggtaaataggcaaggtactggataatgggtacctcaactcctaagagagttggtaaagaaacaaggtactggaaaatgggtacctcaactcttgaaacaggtggtaaggaggcaaggtcctggaaaatgtgtacctcaactcttaagaaacttgttaaacgaaaacaaggacttagctatgtttctgtgattttcatgatcgccatgacagcgtccccttccagcaggaagaagtttggaatgaacgacgcccaaattcccaaaaatactttgtattggtatggattttcatttgttgctttgtattggtatagatgttcatttattgatacataaagaagggggagcgtttggccatagcaaccaggaggtctccatgagttgctggtcagccaataaccacaggtgcatcctgctttctaatcctgaattacagccacggccgtccccactggcatcacatctggttgtgaaaagaggagttcttacaggccccacacctctctgattatctgagtcaggggtctcgctaagcagtgctaatttgctgactgcttggtttgtattacattagatacacctaccctgtgtattttgtttgtctcaattagcagttttagaaatagcctgtcaatggaagtttggggaatgggcaactacagagattgaagagcagagcctgattagcatagggagcgtaggtaaatcaggatatagacgggtccaggagtatggaaatataaaattgtaagcccaaacacatttggggaatgtatgtatatatatgcatacataaacacacgcaaatatatatatattaatatatatatatatatatatatatatatatatatatatatatattaatatatatatatatatatatatatatatatatatatatatatcaccttctgccttaagagcagacatcctggcagtaactgtgtacagaggtaaacttttaacaattgtctcctgcctcccagcttcccagctaggcagctactgcagacaaagtaagattctaactattgcctccatgggaccctcttgttgtattccctgaagttttaactatcatcccgtgtgactctgctctctgccttgtattctctcagggacagccactgtatcagccactggctttcccaaacatcctaacttaacatcctataatgaaaagttgtaaaacttaaaatgtaatgtgactttaagcatgacctccaggttataaaagctctttgaacccccctggtgcttgtttttattataagaagaggctagaaatcagccccggttgccacagtttcagaagactgatctctggatgtgatcccagttaactgttaagcttcttgtaccttgcactgattttttttctttgttgcttgtttgaataaagattgcttctggttttatagacctcggtgttcttcctctcagtatttgtgccttcccctgacccaacagatatcagccatcagagggggtagtgttcgtggggaaggagtgtgttgggttataagggcagatgaaaggagccataaaaggcaaacagagagaggctaggctgaccttcacacaggactgactgtgtttatattggtggaaacatgggagggcatcatctcagtctcactcacatgcagggatggtcgggccatacatcccatggcctgtgggtagatgagcaaacattcactccatgaggagggatgagagagaattcccactggaagaacctcactgcaacctttataggggcagaaatgacttccatagtccagaagctgagactctcaagtgtcttggatatcgtgatggctgtggggcaggagtgtcttgagaatacaagacaggctctggagatgtctttgttgttagaacagagttagcatatgactgggcagtctgttgggccattggtcagtgtgtttttgagaagaaagaggaatcatttgtctctttgatgtcccctggagtctggaatggatggttgggaagaactacttacgtttgaaggaccaaaaattaaaattaacaaaagtttacaaacttgggccctgaaaaggcaagttctagtgactgggaaggccatagctgatgcctgagccctgctctcagagaaggggaggtgactgtccaccacttgggtcaacattcctttgataattgctggtagtgcaagccaagcagctgctccccccagatatggagaaacccaagggaactgctgggtatgtggattcaggggcctgaggtggagcttccatgagaacattccagaggttttgggtatatggatacaggggctgaggtggagcttccatcagaacaaccgccttgactgttagtgaggttttcatcacacgcctggggtcatttttgtcgtctccacagttcagttttctgagccttagaaggtcactttttggtaaaatagaatcgggtaaataaaaacctggatacagtcgaatcagacatgttcctcagctgaacaccactcagtgcagacactgcagagcaatagaaacactgccgagcactccagaagggagtccatctggttgacaggactcgtagaagagctcaggaagggtggcatttgggcgagcccttgcaggactagggtgatttcataaatgagatgggaggacagaatattccaacccaacacagttgcaaggtctggctgtggaatctgtttcagacattcgggaggcacgtttaccacatgtgatgacnnnnnnnnnnnnnnnnnnnnnnnnnnnnnnnnnnnnnnnnnnnnnnnnnnnnnnnnnnnnnnnnnnnnnnnnnnnnnnnnnnnnnnnnnnnnnnnnnnnncggagctttggttatggttttagactttcactgtatttgcatttttgtacatttatcagctacaaattaaaaaaaaacactagtaaatttgaaagtagaaaagcaatgctatttataacatttttcacaactcatggaacctttgctgcaccctgacttcctcatctcctctcatcactcttcctccttctcctttctacgtcttaaaagccacgcccacactcagagctcctcacactgtactttctaggctgggataagcatgtaagggagtacataatattatgctttccaggtccccactttcctgcaagcttcatttttcttatatctgaggaacaatcctgtgttacacatgtacccccttttcatcatctgtttgtctgttcataggcttctaggtcaggatttttttactcttgtaaatggggcaacagtccacatggatgtgcaggtatcttgtgttatgatgcactcttctctcatatatgctcagcagtggcatagcggggtcacaaaaggtctgtttttaaatataaaaaaggctccatactagatatatcagtttatactcccaccagaaataaataagtgtccctatttctgcacagagttctgacatctgttgtgagatttcttggtaatcgccattctgacagcctctaacaagagtcagtatgttttcatatggttttaatgtatatatggtataataacaggaacgtctggatcaagttttggtatcaaaaacctatttgaccgtgtcatgtgttgtgtgctggtattcatccacagtgaaattcagagaagtaaggagttttctttattttgtaatttcaggagcaggaaagccagaagaggtctcaaacaaaaatatctattatgattgtcctagagattggattggagttggaagtaaacgtttttatttttctgaaaaagtggaaaactggacatccagccagaccttttgcgtggcacaaggagcccagctagctagatttgacagcccggaggagctggtaagaaaggatcaggaattggtttgttgttttgtctgttgaatatttactgccttgaggtagggaggctaaatatgaagcatgaggaaagatgccaccctaggctttcagggagaatcatggtgtgtgtgttagtttgtgctacttgtgttggcaacagccctgagacattccaaagacattctctcctgcaatgcaaataggcaaactgcatggccacatagacatgactgagaaaaatggctgtcaccttaagcctttttctgagatggcaggtgttgcatacctaaggtgacagctgctaataactacaagtagaggcttagccagggactttctcagccgcagaaggattggtggttgtcagggtgccatgcatccactaagaaccgaagatgatttaggcgccaaagtcaatgaccttcagtgcaaacctgctgccatcctgagaggaggctgtagggcagagagactcaagtcttatctgaagctgagacacatgcattcgccttctgtgttctatgacaggaatttctgaagaggtacaaggggaggcatgaccactggatcggcctccacagaaagtcctcagagcaccattggatgtggacagacggcactgaatataacaacttgtatgttcagaacacttttccttctactgtgatcacgtattgggacatgtgagggttgtggctgtgagagatgacaggttgtgtcatgggagttcaactgtactggggagatagcattgcaggagtgaataaatggcagactgcagaaattctgtttgttttgttctaggacttccccccgaggagaaggagagtgtgcctacctgagtggcagtgacatcagcagtggcaggaactatactcacaggaggtggatttgtagcaagcccaacagtttcacagcttgtgatgtgccaaagcagtcgtgagaggtctggaacatgttatctacaatggcaacctcatttctttatcttataaaatcatccaaattaattcagaatctgtggtgacttcaaagatgaaagcaatcatggaagatatgcttatagtacttgggagactatgcatgatcctaaattatataagtgatttggtatgattggtccttgtctcttaaacctgaattacaatcacatcagtattagtgttctccatttttattacaaggtatgaaaattttttcatccgctattcctctgaatgactggtacatttaaaaaaaaaatggtgcacaggattgagccaagagggctgaaacaaacagggctcctgcagaaggccagaagaggaggcagatgttccagtctctcctgcaccgtctccccacagctctgggtatcctgcatcaggccgcatcacaggtctacagtcgccatggaggagcctcagtcactgatgccacagcccctgtaacccaagccagaactgaagtgaggccctgttgttagaaaatcagggccgggtgtcagagagaatggttgactctctgataaacgagccttggcacatctgtaagttctgttatcagaaccttttaacaatatttgaagattgattcaagatggtgtctagtagggtggcttcttggtcccaactggagacactgctgcttgggccacaggtgcaatgttcacacctaatgagccagcagaccggccttcactgagggcagagagacgtacagaggcctggagttctagtgggtcctgcctttagataccctgtccagctggaaattcaccttggctttaagcagcatcaggatgtccgtgatggagaaaggttccttttctggattaggcctcctcaaacactggcagggtggtggtcaacagcagcctggacctctcacaggctctgttccctaatgcactacccagccccacgaccagcctggctctgacggacagtgagatatccaagatggagaatggttcactttctggattttgctctctaaatttggtgttttcaggggccatgagaattattgcaggtgacaactagtggtcaaatgtgaacccaccagaggagtgactatgtgctggaggttaatcctgtccagaaaaggaccatgtctgcaggaccatggactctgaaagctgttgatcgctcttgttagagcagtttgctgtctccctgatacctgcactgtaatgtgtaaactcctgtgacctgcgaatgttctgttatgattgcatctcagtcttacagacacatacatatatctgtaggtggtcaggtagatgactgtttatttgtttagaagattgggtgaatataagtccagaatttaatttaagtaaattatccctaatagtttataagttagtagttgggtgataaatcgttacactgcatttaaaattatttttatagtttataattaaagcaaaattatttttaactgtttataatttaagtgtgttctctttatagagttagagttttatgttttacttttgttaaatttaaagaggacagttgcaattgaattcataatgtggaaatgaaagttcttccccagtaatacaatatataagaagcgtgtagatagttagttgcagagagaagataaatatttatctttaagtctttatgctcagcagacatctctaaacaaactgaaagacctttaatcagacctttatgacacggccatgattttgtaaacaagcaaaaggctctgtcagtatgtgtaaatttagccaaaagaggagaggagagagagaaacagacttttagagctagagaatcatcttatctaactatgcttcatcaaatacagattaatcaaagtaatacaattaatcaaaaactaatagataaaattaagcctctaaattcaaccatttcctttggataatgtaaaatcacaatatttagccacatttaggcacatcgtgtcattctagtatagatttttatgactcttctnnnnnnnnnnnnnnnnnnnnnnnnnnnnnnnnnnnnnnnnnnnnnnnnnnnnnnnnnnnnnnnnnnnnnnnnnnnnnnnnnnnnnnnnnnnnnnnnnnnncttttagagctagagaatcatcttatctaactatgcttcatcaaatacagattaatcaaagtaatacaattaatcaaaaactaatagataaaattaagcctctaaattcaaccatttcctttggataatgtaaaatcacaatatttagccacatttaggcacatcgtgtcattctagtatagatttttatgactcttctgacttactatagattagagatattctaaaatcatatacaactcacctacaaggtggttcaactaattctcatcttgtcatcaatatacatcattgacttttattaatttcaaaatcattataattcttctagtcatcttcagacttttaattagactcattgctcactcccctagagaggtttccatgaggtacccattttccagtaccttgtttctttaccaactctctttggacttggggaacccatctctatgtaagtgttaataagaaagcatagaagagagggtctcactgccactggcctgtagcactctgtggtctccttgatttttccttcatttcccctggcttgtatcaccttgtgctctatctctgacatggtggccttggtggtctccaggtgctcaaccagctcagtgtcatccaggaagctccactctgaagcatagaagcatggccagcctcccagggcaatttctcagggttttctttcctccctgatctcagtgggacttccacttgtggcgtctgccccaagagcaagtgtaatgtatggggggaaagcctggagatttcaatgaaagactggaagtctggtcatttgtgctaagagaatgtgtgtctgcctctctgttgcagggagagagcagcctcatatacagactcacagcacagtggaaaaaccccaggtgtaagagcccaggttttcacaactagatgtgatgccagtggggcaaggctgcgtctgtaatccaggactagaaaacaggatgtgaaagacccccatggggtgggattcctgggacatacactcgggagcagcgaccccccagtcaccaggcggagatgagagcttgatgcctagagcaagaggctattttattcagtaactggggctggggaccaactagttactcacgcaggaacagaggagctggaccgcgaactcctgtctaggggcttcttaaaggcaaaaacttcaaacagatggggtctggggtggtcgagggtaacagttctgattggcacattccaggtggccgaccacaatctccgggctcaggggtcgtttagggcacttacatgttcatctctgtgaaccatttgttctttaactttagcggctctttcctgttagggtcttaaatttagcttctcacatatctacaaaggaaacatcttaggctggggtccttcaggatctcattgcatagcaggcaaatgagataccatccagtcaaaaaggcagaccataagggtgtgggccataaactacagagttgctatggttacttaaggtcacacaaagtacagagtcagttagtgactctactaattaagggggatacatttgactgagataagacaggacaggaggttggggggggcaggttacagggtctgtcaagtaacctcggggctgggaatctttacaaccagcagggcacctttacaaccagcaatcagcaaaagaatgccaacaggagtgatgaatagtcacctctgcctctctgggagccatctcaggtgccagccatgtcattcccagccatcagaagctccccctcactctttccttcagagcccaagtcttttctaccttcaccaatttttttgatccttcagatgtacttgtgggttttggctgacaagcaactcattgagaccccgaggtcactgcagcccaacagagaggctaactgtgtaggaccagaaacaaatgacacacattggctcccaaggcaagggtatcaaatgggatttactttgcatgccagggttgcaactatacttgttgtcctggagggaaaatgtgtcacagtctccttcactgcagactcaggtgttctcctggctcaggaagtatattgatatcgtgttcataatatcatgaaaaacagaagctaaagatgagaagagacagatgaggcatattcagtttattataaggcccgtataatgcatggcagagtagagggagtaagagagaagaggaacaggggtaatggctgaccaccatggccggtcgccatagagaggcagagagagcatgtaggtgggagaagagagagagaagcagaagcagagagagagagagtaaagagagcgagcagcagggaagttggaacttttaaagggaagactgcacatgcccactgaggttccatgcatgcccagagtcctcacccaggcagtaatgcgaggcaggttttgtggtgatgacatagcacgttttcctgtgcgtgccctgactgttgttgggcggggtctgtctcttaaagagatattgcccatcagcattagagcctgaacctttcgaaagtatttagtttggcaagcttccagaagctcagcatttttcttttcacaaaattaaatggggaacatgaagggagatataaacagttttaaaaccaatattatacactgtgcaattaacttcgtaaggagtgtttgtgacgatagctctggatttacctcttatagatacattctataagttatgttcctctagagcaccctgacaatcagtgatatacggtgataagaaggacaggatgcaggtaaaggggggacctgtaagtcatgaaaaagttacgatgaaaattgcttttctagtctcagctctgccatagggtattcttattttgtgatgaacaatttaatagaaaatgcaattgacagtgaaaatctaaaaccataactaaagatccaggtcttcagagtggctattccagctgtgtggaagtgcaatgagacacataggttgcaggacctggtaagtttttgagtggctaatagaatgtaccacacttgtggattttgcctttataaagtccctgctcactcagttaggggccgattctagacctgaagtttcaagaatggttgaccctggccaagtctgtgtggctcagtgtcagggcgccaggaaaattccattagggaatttctcaaggtccaaacctctgcttccagtaaccaggagctcaggtatgcattgaattggggatgcttgctgctttgctattgaacagcatggcctcagtggagaatgtcccctagtttgcatctctgcagaactaagcatttggctaggcctgcactttggcagagggctaggtgcaagtaacaagtgaggacagagttaggaggcatatggtggaggggtctgctgggggagagggaaatggccagaggagcacgtttagattacaaccaggaaaatgctaaataaagaagagcctccagttttgcaccatggaactgagagctctctaaagatgacaagatgcttgtgtctggtctttatcaccgttgggttactaggaatttccaagtccacgctcccccactcaggcagaacctcatgacttcccgggtttggggctgagacatgccgagccaagacagctcagtaagaacttgaagttcatagagctcctcctggccttgtcctctggggtgagagcacctcatttacaacaggatgaggcttctctctgacctcctatctgtgatccttggcaatctgtctttcctgagagtggccaaacagtggagtacatcagacttgaagagccactgaaagggagaagttttgttcaaggtgaaataggtgcgctggggccacagctttcaccttagacaggacggtgtggcccggtccctcaaccaagggacttcagtataaagggctgagcttctgccgttaacccaggcactttactgtgagcagggcaaagccctctctgtggacacagatatttttgttcacttgccaaagccatgtgtggccctaccagcctgagcagccgcagcctgcgccctctcccgcccgcccgcccgccctccaccagtcccggggtctctttcccccttccacctcctccatcccccccccctcccgctagcgggggggggggttgctcgccttccctccagcccctgttgtcccccccccctccgcctcccgcccttccccttcccgcccgctctccgttttccctcagtcgactggagcctccagttttggctttcactcccaccagtgaccaaagacttgaccactccaagtccagctccctgtgactactagacatggacaccggtgtgactgaagatgggttaaatgtcactctcaccatcaggctgcttacgcatggaaaggaagatggcattatcatcggaaagaaaggagaatccgtcaagaaggtgcgcgaggagagtggtgcccggatcaacatctcagaagggaattgtcctgagagaatcatcactttggctggcccgactaatgccatctcaaagcctttgctgtgatcattgacaaactggaagaggacataagcagctctatgaccaattgcacagctgccagtagacctcccgccaccttaagtacggtaggtggttcctgctgtcagtgtggctctctctttgggaaaggtggttgcaagatcaaggaaataagagacagtacagggtctcgggtccaggtggcaggggaaatgcttcccaactcacctgagcgggcaatcaccattgctggcattccgcaatccatcattgagtgtgtcaaacaggtctgcgtggtcatgttggagactctctcccagtcgtcctccccaccccacccccaagggcgtgaccatcccgtcctggcccaagccctcgagttctccagtcatctttgcaggtggtcaggcctataccattctaggacagtatgccattccacagccagatttgatcaagctgcaccagttggcaatgcaacagtctcattttcccatgaccatggcaacaccgggctcagtggcattggatccagctctccagaggtgaaaggctatnnnnnnnnnnnnnnnnnnnnnnnnnnnnnnnnnnnnnnnnnnnnnnnnnnnnnnnnnnnnnnnnnnnnnnnnnnnnnnnnnnnnnnnnnnnnnnnnnnnntaccctttttccagtaccttgtttctttaccaactctcttaggagttgaaatacccacttttcagtaccttgtttctttattcactctcttaggagttgaggtacccatttttcagtaccttgcctctttattaaccctcttaggagttgaggtacccattttccagtaccttgtttctttaccaactctcttaagagttgaggtacccattttccagtaccttgcctctttaccaactctcttaggagttgaggtacccatttttccagtaccttgcctctttattaaccctcttaggagttgaaatacccattttccagtaccttgtttctttaccaactctcttaggagttgaaatacccacttttcagtaccttgtttctttattcactctctaggagttgaggtacccattttccagtaccttgtttctttaccaaccctgttaggagctgaggtacccattttccagtaccttgtttctttaccaaccctgttaggagttgaggtacacattttccagtaccttgtttcttttccaactctcttaggagttgaggtatccattttccagtaccttgcctctttaccaactctcttaggagttgaggtacccatttttccagtaccttgcctctttattaaccctcttaggagttgaggtacccattttccagtaccttgcctctttaccaactctcttaggagctgaggtacccattttccagtaccttgcctcttaaccaactctcttaggagctgaggtacccattttccagtaccttgcctctttaccaactctcttaggagctgaggtacccattttccagtaccttgcctctttaccaactctcttaggagttgaggtacccatttttccagtaccttgcctctttatttatcctcttaggagttgaaatacccattttccagtaccttgtttctttaccaactctcttaggattttgaaatacccacttttcagtaccttgtttctttattcactgtctttggagttgagttacccatttaccagtaccttgcttctttaccaactctcttaggagttgaggcatccattttccagtaccttgcctcattaccaactctcttagtagttgaggtacccactttccagtaccttgtttctttaccaattcttaggagttgcggtacccatctcttcctgagttcattaattaggaagtatagaaaagaggcttttgctgccactggcctgtagcactctctggtctccttggtttttccttcatttcccctggcttgtatcaccttgtgctctatctctgacatggtggccttggtggtctccaggtgctcaaccagctcagtgtcatccagaaagctccactctgtggcagagaagcacggccagcctctcagggagatctctcagggtcttctttgtcccgatctcagtggaatctcctcttgtttcttgcaccaggagcaagtctaatgtatggggcgaaagcctggagatttaaatgatagataagatgtccggtcacttgtgctaagagaatgtaagtctgcgtctctattgcaggtagagagcagccttatatacacacttacagcacagtggaaaaaacccaggtgtaagagctggtgtttttacaactagatgttgatgccagtggggcaaggctgggtctgtaatccccgactagaaaacaggatgcacttgtggttattggctgacaagcaactcactgaggcccagtggtgactggggcccaacagagaggctaactgtgtaggaccagaaacaaatgacacacaatggctccctagcaagggtatcaaatgggaattactttgcatgccggggttgcacctacacttgcttccctggagggaaaatgtgtcacagtctccttcactgcagactcaggtgttctcctggcacgggaagcatattaataccttgttcataataccagaaagaaaaggagcctcattctactcctgtactgctggaaaaggccctagagaggcaaccaccagctgtaaggcagcagtagggctccaacagggacagcactgcaaactgaacagtcatatttgaaaagtttctgcaccccaacaagcctctcccctaatgcaacaatgcaaatcagaacaattcaaacagaattagaaaaagcctatgtttaatggatacaacactcccagatggcttccagccctccagagaggagactggaaacaatgactggaaaaaccatgagcctgtattctggggcacagtttaaatacccagttggagtggtcttgagcatctctggggaaggcatcatcatttggcaggctttctgagatgcagcagggtttggagagagatgggggaggcgtgtgtggaacttccaccataacattccagactctttgggtgtatggatgccaggggctggggtgaagcttccaccataacagtattaaggaagacctgaccctggtacaagaaagcatagtcatgctacaaactcaaacagattcgaaaaccacagagggtggacttaataactgctggaagaggctcctgtgcctttctaggagaggaatgttgctctgatgtgagtgaacctggcctaggaaaggggatgctagacagttattagaaagaatcaaacacagagaaaggacagacgatgctttctggaaatcacctctctgcttggggattttggaggtgccctttgaaggcccaatctttgtaactgtgctaactttattgtttggtccctgctgttttagctatctcactgacttcctccaacagagactgcctaatttcccagccaggagcatcactggaattgtcatgcccccagagtagcagcttttatctaacccggaagcatcctcaacatgctcactccacctttgggacccaccagccgaagaagactgctcaacactattctctgttttaccctaccccagttggggtattttgagtaggagcctcaggtcataagggattgattcaggatgcactgagtgtagccccaggccataaggaatttcttagccccagagtgactgcagcaatgatgtgcctggttagtgaacacagctgacctgcttccaattaaactgcaaacacagctgttaatttttggtagctacacacacacacacacacacacacacacacacacacacacacacacacacgccctccagcccctgtaaatgtgctcaaccttaatgccaaggaaagattggtcccctctctattccaataaagcactctcagcctgctggtacctagtctacctcttctctgcttcacttttcctaaggtgccgaaagaccccagaagaggtacttttgcagaaggagacccgtacccaggaatcagcgagaccatgaacttggatgcaaaaagcaagaggctttattggatacacgggtacccgggacgacttagcttctgtgaggccaagcgccccgagccaagggagaggggtccttatatagcaaaaagcgcggtacagaagcgaaaagcatagttacagggattctattggacaatttaaatgaggcacagagttattggacaattcaaatgaggcgcagagttatttcagatcagcatgttctcaaggtctggtaatcagacgaagctgactcggctctatcttgggtacacagtggttacaacagacccggcagtccctccctccgcgtccagatggctgaccacagatatcctgtgtggcaaacgccctgaccttctattctcagaaacggttctgggtggtcttggtcccttggtctgtaatttagcttgcccaagagagagagagagagagagagagnnnnnnnnnnnnnnnnnnnnnnnnnnnnnnnnnnnnnnnnnnnnnnnnnnnnnnnnnnnnnnnnnnnnnnnnnnnnnnnnnnnnnnnnnnnnnnnnnnnnccctcttcaacactcacttgctcaaacaacacaacaaaacactcgcaaacgtccccaacacatggaccaccacgccgacatacaatgcaagtggggaggggacagacttgctttccctctcacaacacggtcccgtcctcaggctcctcacacaggaacaaatgaccacagtccatcatctcctgggctgggcaaacaacgctcaccacggcgggatctgcgggagaccgattcaagccacaaggaaccaggccctgactagaagccgcggtgtggaccagagcgtggaggaggctctcagggagctccccaggtgacctcttcacagagcccaagtgtcaccacctgtagacctgtctactttccctggatttcatgataatcttaagtttatcagcccagtaagggccaaaaggacttgacttaaggttcactaattagttacaacactgagaaaccataatttttaaggaaaacaacacggaaaatgtatttgtctgtgaaaaatgtttatgtttttacagaaagtctattcattgggatataaaagaagggacgactcagatttagtttttccatacccttttgaaatttgcagctctctaattggaccccagggagaggggcgacctcaatccaagaataatatctggacctgagcagttcaggagtttactcgcccacagatgtgtagtgtggtagagtttggtgaccatctgtcttctgataaaagcagggagcacaggtccctcaccaacaagaacaacaatctaattgtctcctcatgagtatcttttctttttctttcttatttttgtttttgttttgttgttgttgttttatttttgcttttgtttctcgagacaggatttccctgtagctcttgaggctgtcctgaaactcactctctagaccaggctggtctcaatctcacccagatccacctatctctacctacctactgttgggataaaggaattcaccaccactgtccagcaagtatcttttctttttctccactttctttgtataaaggttgggctctagacaattaatgtccaaagaggaagctggggccccaggacacctatttcaccttgaacaaaacttctccctttcagtggctcttcaagtgtgatacactggactgtattggccactctcaggaaagtacagattaccaacgatcacagataggagttcagagactcctcatcctgttgtaaatggggttctctcatgccagaaaagtggccaggatgagctcttgatggacttcaaattctgtctgaccacatagacttggccagggtcacacactcttgtgacttcaggtctagaatcagctcctagctgagtgctcagggattttttaaatacaaatccacaagtctggtacattcaaatatcaactcaaacacttaccgagtcctaaaacccatgtatctcaatgcacttctacacagttggaatagcctttctgaagacatggctctttagttatgacttgtactggttttagacttgtactgtcaattacatctttatgaacgttttcaccacaaaataagaaaaccctatggcagagctgagactagaaaagcaattgtcttcataactttttcatgacttacagcccccctcacctgcatcctgtccttccttgtcaccatatatctgtttttcagggtgctctagagaaacagaattcatagaatatatctttttgtgtatatagaaacggtgttttattagaatgactttcaggctgtgatccaggtagtcctacaatgactggctatgaacagaaagtcccagaatcctgaaattgctcaatctatgagactgggtgtctcagatggtctnnnnnnnnnnnnnnnnnnnnnnnnnnnnnnnnnnnnnnnnnnnnnnnnnnnnnnnnnnnnnnnnnnnnnnnnnnnnnnnnnnnnnnnnnnnnnnnnnnnntcaccatatatctgtttttcagggtgctctagagaaacagaattcatagaatatatctttttgtgtatatagaaacggtgttttattagaatgactttcaggctgtgatccaggtagtcctacaatgactggctatgaacagaaagtcccagaatcctgaaattgctcaatctatgagactgggtgtctcagatggtcttctgtagatgctgggatcccgaagatgtaggctctaaggcagtggttctcaaccttcctaatgctgtgaccctttaacacagtttctcatgttgtggtgactgccaaccttaagttattttcattgctacttcataactgtaatttttctactggtatgaattgcagtgtaaatatctgataggcaggatatctgacatgtgaccccaaaggcttagagacccataggttaagaaacactgctctagtgccagggtaagaaaggacttcctagcatggtgagagcaagcaggcaaagagcaagagcttccttcttcctcgtcctcacataggcttccagcagcaggtgtggcccatgttcaaaatgtgtgctcctgcctcaagacccgaattgaaggcatgtgtcttcctacctcaaaagtcttcactagaagtggattcacccacctcacaccaagcacaaattttcaccggtgtgaccttctgtaggtggaggttcttgtctgaccaggtcctgccactcttctcagcattaaagaaaaacatggatgctatattagtcagtctgtagggaagctggggccctggaaagcatggtgaaactggaactgggtgtctgtctactttcttcctcaggctgtagggcagatgtcctcaaggttcaggaacaaaggtctagtgtttcactccagctggttcagaccaccctctcctgtggacacagaatccagtttttctctattccacgaatctcaccaccgttccgataaccagtgctcctcattctcctcctgtgagaaaacacagacatgctctagaccccagataattggggggtcccatcccctccattgtctggtacatgaatctctccattggacctgagcgaaatttgcccaagttctggcatgggagaatctgtctgcagcagattgctcaccagcatccacatttaaaaagtttacgataaacagtgcgtggtttaacgcatcatgtggagactaggcgcacagctctcccctttttatctttgcagctgcctttttagagcactatgggactgctccactattccctgtccgtggggattttaaggaatacctgtttgtgatcaattttccattgagcacaaatttgctggaaagcatccagacccattgtctgtttttataacttttggcactcccacgtaagcaaaacatcttaaacagtgacttataacatgtctggtgacttctccagtttgtggagtggccattaagaaaactaatatttgtcaattgtcaagtgtacatatttcaacctgccaaactctataatatgagtaacatccatttgccatagatggttggggagtaggcctcgatgattcacccctaaattagccacaggtagatactgtggacacactccacattgtttgatgatttgacaagcagtctctctgcttaagccaaattgttttctcaaatcctgcgattctgatgatgaaagttatgagactgtctcactctctctacctgggacagagctatcagttttgttaatttatctgcagctctgttcccttcagctagtggccctggaaggtttcagtggtctcttctatgacccactaacatggcaattttctcaggtgaattgcattttgaatttgctcaagtataagtactgaaaagaaggaaataaagtcatacaccaaggacatctgttcaaccatgttcatagcagcattatttgtaatagccagaaactggaagcagcccagatgcccatcaagcaagaatggatggagaaaatgttgtacatttacacaatggagtattactcagcagaaaaaaacaatggaatcctgaaatttgcaggaaaatggatggaactcgaaaaaccattctgagcgaggtaaccaatcacaaaaagacaaacatgatctgtactcactcatatgtggattttagacatagagtaaaggattagcagcctccaatccaactgtcagagatactagtaagcaaagaagaccctaaaagagacaaactttgtcccctggagaagggtaagggtcaccatcccctgagcaaattgagaacatgggaagaggggggaggaagctacaagagtgagaagggaagaaaaggaaggatgcagaggtcatgaggaagcagaaattttgagtcaggtgtagattagaagaaaggacagatgacaggtaggattttagtggggggggtgataggggaggacgggagggagaagggagcttggatcgtcatgtaattcaatcttgtttgtaattcatatatatatatatatataagtgtaaagaaaagaaatgactctagttctacaacatggaactgagagctctctaaagatgaaaaaataaattcgcaaccatctgagtaatacagaagcgtctattgaataacacagaagatcagtctcaaactatggctatagcaaaatagtattagcttactctttaacagctcctgtgggcccaattaattatcaaagaaatcctgttttaataaatgtatatgcataaaaaaaataaagaaaaaaagaagaaggaaattaacggtatccaggagagaggtgatcctgccataactccgcgttagttaaaaaagaaatatttatagaacgcttggtcgctatcaatgaaagtaactccggagtcggataaaactcaagagtcacagaagtgaactaagcttctatgttggggaaggaaaaagtgtagtccagactggcctcgaactcagatccacctgcctctgcctcttcagcaaatcctaccggcctgcgccacaagggccggcgatacaacgcaccgacagcttcctacttcaagccagttttggatgacgtaacacgttcagcctatactactccttccgagaaaacttcagaccaacacctcaccgcccctgacggaccttacaacaaacacagcgactcacaacggcctccaggactcccgacaaacacaacaaacacctcacaaacctgctccctcttcaacactcacttgctcaaacaacacaacaaaacactcgcaaacgtccccaacacatgggccacgacgccgacatacaatgcaagtggggaggggacagacttgctttccctctcacaacacggtcccgtcctcaggctcctacacaggaacaaatgaccacagtccattgtagggagacaccctagccccgtccaatagtcctgggacaggtaccaggtggacccgggactcgcccataagggcgtggtgaaggaaagccggggtgaagtaagggagcttcttaaggggctgcacgtggggacccgggtcccttttgttctggccgcgcttgctgggttctataacctagctctggcctgtgttttgccttggtgtcttcttgaataatgagactttaatctaaacaggtggcgctcataaaaagcatcatgtaaatagcaagggtttaaagaagggcttctccatcacttggcaacaagccaaggagatggtgagaaactgtcctacttgttccttttataaccaaactccactgccagcaggatgtaatcctaaaggctttcggaggaatgagatctggcaaatggatgtctttcactttacagaatttggaaatttgaaatatgtgcatcataccattgacacattctcaggtttccaatgggctactgctctcaactctaaaaagctgattccgttattacacacctactggaggtgatggcagttatgggcataccggcgcagataaaaactgacaatgctccagcatatgtctccacaaaaatggaacagttcttcaaatattataacattaagcatgtcacaggtataccacacaaccctacaggacaagcagtcgttgaaaggtctaacaggacacttaaggagatgctccataggcaagctggtaagtcaaaaccccccaaacatagattacataatgctttattaacgttaaactttcttaatgccaatgacagtggacagacagctgcggaaagacactggactacggaaaaaactgctaaactgaaccaaccagtgtattataaagatgtgctgacctcggtatggaaacctggacatgtgttaccttggggtaggggttttgcatttgtctccacaggagaagaaaatctttggataccatcaaaattgatcaagattcgagttgaggaagacaaccccctccacaaggatgactgacaggtattttctgaggaacccccctctagaagtcaaaggacactacatgtatggatacttaaggaaagaatgtagctataaccatcaacaaaaggaacgtgccatatggtaaaatttacagctgtctctcgaataactctatgtctattcatttcctagtccctattcaactaaatcgagactggatttagagttggatttggctttcctactctaaaatccaagcatgttatttaacatttaaaagtttctgtgttatatcaaaaagccaattgctgtaatacagaataaataaagaataagaggactatctttgtcttttattggctttttctttcacaccctctcataatcgttgttcgtcaaggttcgtcaaggtacctttcccggtacacatacataaacaagcgaacatttctctgatgacacttatgtttgagtcccatacagccaacaagacccagcctgacagcaatccctacatgccccggaaaaggaattggactacaccttcctgactacactggattcaactcactctgttttgactgacactccaaccaaaacctcgagtaacgacttcaatcaagttgaggatttcaacgtagatcttcaatcaaacaaatctcatctaacatggactagacataactcattagagactttccctgtactggcattttttttcccacagggcccccacatgactaccatcgtcccatttcagcaggaagtaacctagaagatgctatgcccccgttccccattattgtgtattagggtagtgtaagcctagttaagaatgaccttcttactgtttagagttgggattggaagaaggtgttcaagttagacactttttccacatgaatttaagacttaggtagaatagacataggaagtaccatagcagattattgtatcttcttgtatttcacccttatgattgttagttttggatattttacactattaagttttaattctcttttagactaaaaggggaattgtagggagacaccctagccccaccatatagtcctgggacaggtaccaggtggacccgggactcgcccaaaagggcgtggtgaaggaaagccagggtgacacaagggagcttcttaaggggctgcacgtgggggcccgggccccttttgttctgaccgagcttgctgggttctataacctagctctggcctgtgttttgccttggtgtcttcttgaataaagagactttaatctaaacagtccatcatctcctgtgctgggcaaagaagcgctcaccacggcgggatctgcaggagatttaagccacaaggaaccaggccctgaagaagccacggtgtggacaagaacgtggaggaggctctcagggagctccccaggtgacctcttcacagaggccaagtgtcaggacctgtagacctgtctactttgacctggctttgatgataatcttaaatttatcagcccaggaatggacaaaaggacttgacttaaggttcactaattacttacaaaacagagaaaccttaatttttaaggaaaacaacacggaaaatgtatttgtctgtaaaaattgtatgtgattttacagaaagtctatttcttggtatataaaaggagggaccactcagatttagtttttccaaacccttttgaaatttgcaaatctctaattggaccccagggagaggggcgacctcaatctaagaataatatctggacctgagcagttcagcagttttagttgcccnnnnnnnnnnnnnnnnnnnnnnnnnnnnnnnnnnnnnnnnnnnnnnnnnnnnnnnnnnnnnnnnnnnnnnnnnnnnnnnnnnnnnnnnnnnnnnnnnnnntgtatgtcggcgtggtggtccatgtgttggggacgtttgcgagtgttttgttgtgttgtttgagcaagtgagtgttgaagagggagcaggtttgtgaggtgtttgttgtgtttgtcgggagtcctggaggccgttgtgagtcggtgtgtttgttgtaaggtccgtcagggggcggtgaggtgttggtctgaagttttcttcgaagaaggactataggctgcacgtgttacgtcatccgcagtcgcttgaagtaggaagctgtcggggtgttgtatcgccggctctggtggcgcaggccggtaggatttgctgaagaggcagaggcaggtggatctgagttcgaggccagcctggactacactttttccttccccaacacagaagctcagtttaagtccagtgatttttctctgttgattgctcttcctctcccagctccgtttcccccgtattgttcttttgccattgttttccatttgcttcttcttcccagttgttttctttctccttttttcagttgattttcctcccgtctttcccctgaagtttcccttacatctttccttattcttcttcctatctttttctcttactcccggttataactccaagacaaaaaattgtttgttttttcccttgtatgagtgctcgcccttcatgtatgccggaagagggcaccaggtctcattacagatgaatgtgaaccaccttgcggtggtagttaatggaattcaggtcctctggaagagcaacccgtgttcctcagcctctgagccatctctccatccccccaagagaaaaatgtctgtgaaagaaaggatttcctcataaccaaaagatgcatattttccaacaattaaaatctttacataagaaatcacattaaagctggacattggtggcagaggtttaatcccagcactggggaggaagaggcaagcccatctctgagagatccaggccagcctggtctacagagccagtgtcaggataggctccaggcaacacagagaagccctgtctggaaaacccaaaaaatgaaaaacaaataaaaaatcactttatgttactggtttttcttagacgcccacaaggtgttaaacatttttctttgtgttaattttggtgccgtaatatctgcatcccaaaccaatgactcctttttttaaagtggaataattgtatgactagtttcaaaagtacctaaacataatacctgggctccctaactctttgctatcacaatacaccttctctgtatggtggtgttataatttataattgcttatctcctgatttagctaagttgtctaaagctcaatacaaaaactgcctactccaccaaaaaataaaaaaaaaaattaaaaaattaaaaaatggacctggtggtctctgttaagaaaatacttatacggaaaatactctacaggctgaaaaagaggttgaagcttgggtgtgtcgcctcaggtatggaattccttgcttccttgctcattaaaaccattgcattataacctctatcaggccacagagagaaagtcagaacaagggacataaaatgtccagacctatagagcaggttctggctctactaatccaaaacgcacatttgtgaggaggtaaacatgaaacattaacaatgcacagtgatgacatctaatgagaacttagatccagtatcttgaaagttcaccaaaagtttggcaattccttttcttggtggaaggggaatgggggggggggggaggcagcggtgaattaactaggtttgatttcaaggcaatgaaagaaaaatgtggtccacacagcccaacaattgcagattatttttggtttgctgctggttctgttggtacaaaccttgagaaatctaatcctccccacttgcttcttacggtgctttcattcttcttcgagaatgaagtcatcacatgtggtaaacgtgcctcccgaatgtctgaaacagattccacagccagaccttgcaactgtgttgggttggaatattctgtcctcccatctcatttatgaaatcaccctagtcctgcaagggctggcccaaatgccacccttcctgagctcttctacgagtcctgtcaaccagatggactcccttctggagcgctcggcagtgtttctattgctctgcagtgtctgcactgagtggtgttcagctgaggaacatgtctgcatcgagtctatccaggtttttatttacccccttctattttaccaaaaattgaccttctaaggctcagaaaactgaactgtggagacgcaaaaatgaccccaaggcgtgtgaccaaaatctcactaacagtcaaggtggttgttctgatggaagctctacctcagcccctgtatccatatacccaaagcctctggaatgttctcatggaagctctacctcaggcccctgaatccacatacccagcagttcccttgggtttctccatatctggagggagcagctgcttggcttgcactaccagcaattaacaaaggaatgttgacccaagtggtggacagtcacctccccttctctgagagcagggctcaggcatcagctatggccttcccagtcactagaacttgccttttcagggcccaaggttttaaactttttttaattttaatttttggtccttcaaacgtaagtagttcttcccaaccatccattccagactccagggaacatcaaaaagacaaatgattcctctttcttctcaaaaacacactgaccaatggcccaacagactgcccagtcatatgctaattctgctctaacaacaaagacatctcctgagcctgtcttgtattctcaatacactcctgccccacagccatcctgatatccaagacacttgcagagtctcagcttctggactatggaagtcatttctgccctaataaaggttgcagtgaggttcttccagtgggaattctctctcatccctcctcatggtgtggatgtttgctcatctacccacaggcaatgggatgtatggcccaacaatccctgcatgtgagtgagactgagatgacaccctcccatgtttccaccaatataaacacagtcagtcctgtgtgaaggtcagccttgcctctctctgtttgccttttatggctcctttcatctgcccttaataacccaacacactccttccccaccaacaccaccccatctgatgactgatatctgttgggtcaggggaaggcacaaatactgagaggaagaacaccgaggtttataaaaccagaagcaatctttattcaaacaagcaacaaagaaaaaaaatcagtgcaaggtacaagaagcttaacagttaactgggttcacatccagagatcagtcttctgaaactgtggcaaccggggctgattttccagcctcttcttataataaaaacaagcaccaggggggttcaaagagcttttataacctggaggtcatgcttaaagtcacgttacattttaagttttacaacttttcattataggatgttaagttaggatgtttgggaaagccagtggctgatacagtgctgtccctgagaaaatacaaggcagagagcagagtcacacgggacgacagttaaaacttcagggaatacaacaagagggtcccatggaggcaatagttagaatcttactttgtctgcagtagctgcctagctgggaagctgggaggcaggagacaattgttaaaagtttacctctgtacaccgtggctgccaggatgtctgctcttaaggcagaaggtggtttttatatatatttgtgtgtgtttatgtatgcatatatacacatacattccccaaatatgtttgggcttaaaattttatatttccatactcctggacccgtctatatcctgatttacctacgctccctatgctaatcaggctctgctgttctatctctgaagttgcccattccccaaacttccactgacagactatttctaaaactgctagctgagtcaaacaaaatacacagggtaggcgtatctaatgtaatacaaaccaagcagtcagcaaattagcactgcttagccagacccctgactcagataatcagagaggtgtggggcctgtaagagctcctcttttcacaactggatgtgatgccagtggggacggctgtggctggaatccaggactagaaagcaggatgcacatgtggttattggctgaccagcaaatcatagagacctcctggtttctatggctaagcatctccaacttctttatgtatcaataaatgacatatataccaaatctataccaatacaaagtatttttgggaatttgggcatcgttcattctaaactgctctatgctggatgggggcgctgtcatggggatcatgaaaaaacatagaaacatagctaaatccttgtttttgttaacaactctcttaagagttgacatacccattttccagtaccttgcctctttaccaactctcttcggagttgaggtacccattttcctgtagcttgcctctttaccaactctcttaggagttgagatacacattttccagtaccttgcctctttaccaactctcctaggaattgaggtactcattttacagtaccctgcctctttcccaactctcttaggagttgagatacccattttccagtaccttgcctctttaccaactctcttaggagttgagatgcacattttccattaccttgcctctttaccaactctcctaggaattgaggtacccattttccagtaccttgcctctttatcaactctcttaggagttgaggtacctgctttccactattgtttctttatcaactctattaggagttgaggtacacattttccagtatcttgcctctttaccaactctcttatgagttgtggtacccattttccagtaccttgcctctttaccaactctcttaggagttgagattcatattttccagtaccttgcctctttaccaactctcctaggaactgaggtactcattttacagtaccctgctccttctcaactctcttaggagttgaggtatctgctttccactaccttgtttcttcaccaactctctaagtagttgaggtacccattttccagtaccttgcctctttaccaactctgttaggagttgagatacacattttccagtaccttgcctctttaccaactatccttaggagttgaggtacccatttcgctgtactttgtctctttacaaactgtctgaggagttgagatatccactttcctgtacctggcttcttcaccaactctcttaggagttgaggtacacattttccagtacctagctgctttaccaacccttttaggttttgatgtacacattttccagtaccttccttcttaccaacactcttaggagttgatttacccatttaccagtgtcttgcctctttacaaactgtcttaggagttggggttacccgctttccagtaccttgtttcttcaccaactcttagcagttgaggtactcatctcttcctgagttcgttaataaggaattatagaaaagaggttttggctgccactggcctgtagcactctctggtctccttatatttcattcatatctctgggcttgtatcaccttgtgctgtatctctgacatggtggccttggtggtctgcaggtgctcaaccagctcagtgtcatccaggaagctctactctgtggcagagaagcagggccagcctcccagggagatctctcagggtctttccttttccccaatctcagtggaacctcctcttgtgtttcttgcaccaggagcaagtctaatatatgttggaaagcctggagattaaaatgaaagataagacatttgtgctaagagaatgtaagtctgcgtctctattgcagggagagagcagccatgtatacacacttacaggacagtggaaaaaacccagctgtaaaaacccaactagatgttaatgccagtggggcaaggctgggtctgtaatccccgactagaaaacaggatgcacttgtggttattggctgacaagcaactcactgaggcccagtggtgactggggcccaatagagaggctaactgtgtaggaccagaaacaaatgacacacattggctcccaaggcaagggcatcaaatgggatttactttgcatgccgcgattgcacctacacttgcttccctggaaggaaatttgtcacagtctccttcactgcagactcaggtgttctcctggcaggggaagcatattaataccttgttcataataccaggaaaaacagaagccacattctactcctgtactgctggaaaaggccctagagaggcaaccaccagctgtgaggcagcagtagggctccaacagggacagcactgcaaactgaacagtcctatttgaaaagtgtctacaccccaacaagcctctccactaatgcagcaatgcaaatcagaacaattcaaacagaattagaaaaagcctacatttaatggatacaacactcccagatggcttccagcccccgagtgaggagactggaaacaatgactggaaaaaccatgagtttgttttctggggcacagtttaaataccctgtgggagtggtcttgagcatctctggggaaggcatcatcatttggcgggctttctgagatgcagcagggtttggagagagatgggggaggcgtgtgtggaactccaccataacatccagactctttgggtgtatggatgccaggggctggggtgaagcttccaccataacagtattaaggaagacctgaccctcgtacaagaaagcatagtcacactacaaactcaaacagattcccaaaccacagagggtggacttaataactgctggaagaggctcctgtgcctttctaggagaggaatgttgctctgatgtgagtgaacctggcctaggaataggatgctagacagttattaaaaagaataaaacacagagaaaggacagacagtgctttctggaaagccactgtctgtttggggattttggatggtgcccttggcaggcccaattcttataattgtgctaaatagcatttggtccctgctgttttagctatctcactgacttcctccaacagagactgcctgctttcccagccaagagcatcactggaattgtcatgccccacagtagcagcttttatctaacctggaagcatcctcaacatgctcactccacctttgggacccaccagccgaagactcctcaacactattccctgttttaccctaccttagttggggtattttgagtaggagcctcaggtcataagggattgagtcaggatgcattgagtgtagccccaggccataaggaatttcttagccccagagtgactgcagcaatgatgtgcctggttagtgaacacaactgacctgcttccaattaaactgcaaacacagctgttaatttttgtagccacacacacacacacacacacacacacacacacacacacacacacacacacacacacacgccctccagcccctgtaaatgtgctcaaccttcatgccatggaaagattggtcccctctctattccaataaagcactctcagcctgctggtacctagtctacctcttctctgcttcacttttcctatggtgccaatgtgctctcctatcctgttcccagacagtcactgcccattgtgtgcaaaacacaactctcacctcaaaggagataagagtttactctggagacaaaatgagtgaccatggcccagcaatacccatttagatcaacccaaattccatgttccaaggtgggaatggagtctttatagtcacagaccataggaagccacacatgaagacacttttcaagcacattggtggaaacaccagagaggcagttacagcagtgtgggtggagctttgtcgcaggggtcagatgctacctgatgatgctcttagccttggaggttatgggagctatctgtctgttagtacattgcaaggaaagctagtcttctgagttacctgatggtcacaaaggtgagaggtagagattagcaataaacagttactgatagggctagaaatggaggactggagcgctggctcagttccaggagctctgctgctctctttgacctccatgagccccagggcaggcacaagtgcacatacgtatattcaggcgaaacactaatatgcataagacaaaataatttttttaaaagagggctaaagatgtctccaaactcacaggtttccaaaccctctatggtcactgctaattagccttggagcaggggctgtgaaaattgctgcttccttctagaactttcgttttcaagaggcttgaaaagggctggcaattacatttcatcgttttgcagttgtttttgcttttaggttgagtttccaaggacagtgaagcaccccatgtcatcccaccttggcagcagagaaaaatgtgtgaagtagctgtaattaaaaactgctttgaactatcaaaatctaaaacattccttagttctgtatatgtcctttacggttagcatttcttttacatcacactacctctccaaacttgtaatgccatttctctaagaagcatactatgcgccaaaagggtggctatggcaggatcatccatcagagaacaaatcactggcctggtgggcagagcttccaaatcagctgatttaaagccccgcccactagaaaagttttcccggctttcaggcgtctacttcattcatctgagtttgtttgcggcaacaagaagacaggtggtgtgaagccctcaagagaatggtaactgcagagtctgcttccccagaaggcgagagaggaaattgtaagtatttaatgaatcgtaaactgagctaaagggagagaggggagtttcatcagggagcggagctctttctgcctgccagcctgccacaggggtctacagatcggtagagactgggggtggggtgcggagcgctgcgatgcgttggcaccggtgcaattctttattattctattattctaccgcggatgttatttaaacatgtttggagaagagcaaccaacagcgtgttatgcacgcttctcaggaatcgggaatttgagctcagctagctttcccgccagagtgaggcaatgaggaggaggtagccagagaggctgggattttctctcctttcactccctgtatttaaaggaactgtagccatgtgttgtaggtgttagtgttcaacaaactgcccatcagattacatttccccgtagtcttactgacacttgtgtgtagacaccgtgccctgccagttgcagggagagataaacagcccttctgagtttgtaaagccacgtagctgtccggattcctggaggaccttggacatgctcagacacatcgctgccatccagtgcacacctcaagtgccccttctccaccgcaaccttcttttcctgaccccacccccaacccccacccctgccacgggccttttcatctattcatcccacctctagtaagttcttcctttcctagggcactggccccactgttcctattgttgtatcccaggtttctcaggagggttgggatgcgagattgatcccaccagcaaatccatctgtagttttagtttatggtggatgattggaaaaggacactggagatttctatttgaaaactgtatcctctcattttgaaaaatgtttatgtttcattccttttaaatctctttccgtttcatttttaaaaattgattttatgtgtgtgggtgttttgaccacaagtctgtgtgtcacatgcatgcccggtgcccacagaggccagaagaaggctctgaatgcccagtgggtgctggacacgagcccagccctctctctacaagggcagcaacactgaaccatgtctccatccccactttcttgtttctgcttaggacagagtatttcttgaaaaccagagctcacgattatcgttagctcaagggtcgagtggcaatctcaggagatcaggccaagttcctctaggtggacagaaccctgctgttgtgatgggaaatactgatctgggaggttagggacacactgcagaggaagtcattccaccaggcctccctcgaatccctgggtcctgtcctgtgccatccagtgcacaggnnnnnnnnnnnnnnnnnnnnnnnnnnnnnnnnnnnnnnnnnnnnnnnnnnnnnnnnnnnnnnnnnnnnnnnnnnnnnnnnnnnnnnnnnnnnnnnnnnnntgttgtgagagggaaagcaagtctgtcccctccccacttgcattgtatgtcggcgtggtggtccatgtgttggggacgtttgcgagtgttttgttgtgttgtttgagcaagtgagtgttgaagagggagcaggtttgtgaggtgtttgttgtgtttgtcgggagtcctggaggccgttgtgagtcggtgtgtttgttgtgaggtccgtcagggggcggtgaggtgttggtctgaagttttctccgaaggaggagtataggctgaacgtgttacgtcatccacaagcggcttgaagtaggaagctttcggtttgttgcatcgccggctctggtggcgcaggccggtaggatttgctgaagaggcagaggcaggtggatctgagttcgaggccaccctggactacactttttgcttccccaacacagaagcttagttcacttctgtgactcttggcttttatctgattccggagttactttcattggtagcgaccaagcgttctataaatatttcttttttaactaacgcggagttatggcaggatcgcctctctccgggataccgttaatttccttcttctttttttctttaatttttttttcatgcatatacatttattaaaacaggatttctttgataattaattgggcccacaggaactgttaaagagtaagctaatactattttgctatagccatagtttgagactgatcttctgtgttattcaatagacgcttctgtattactcagatggttgcgaatttattttttcatctttagagagctctcagttccatgttgtagaactagagtcatttcttttctttacatatatatatatatgaattacaaacaagattgaattacatgacgatccaagctcccttctccctcccgtcctcccctatcaaccccccaccccactaaaatcctacctgtcatctgtcctttcttctaatctacacctgaccaaaaatttctgcttcctcatgacctctgcatccttccttttcttcccttctcactctcgtagcttcctcccccctcttcccatgttctcaatttactcaggggatggtgaccctttccccttctccaggggacaaagtttgtctcttttagggtcttctttgtttactagtatctctgacagtgtagattggaggctgctaatcctttactctatgtctaaaatccacatatgagtgagtacagatcatgtttgtctttttgtgattgggttaccttgctttttcgagttccatccattttcctgcaaatttcaggattccgttgtttttttctgtgagtagtactccattgtgtaaatgtaccacattttctccatccattcttgcttgagtggcatctatgctgcttccagtttctggctattacaaataatgctgctatgaacatggttgatcagatgtccttggtgtatgagtttatttccttcttttcagtacttatacttgagtaaattcaaaatgcaattcacctgagaaaattgccatgttagtgggtcatagaagagaccactgaaaccttccagggccactagctgaagggaacagagctgcagacaaattaacaaaactgattgctctgtcccaggtagagagagcaatgcagtctcataactttcatcatcagaatcgcaggatttgagaaaacaatttggcttaagcagagagactgcttgtcaaatcatcaaacaatgtggagtgtgtccacagtatctacctgtggctaatttaggggtgaatcatcgaagactactccccaaccatctatggcaaatggacgttactcatattacagagtttggcaggttgaaatatgtacacatgacaattgacaagtattcaggtttcttaatggcaactccacaaactggagaagtcaccagacatgtcataagtcactgtttaagatgttttgcttacatgggagtgccaaaagttataaaaacagacaatgggtctggatatactagcaaaactttccagcaattttgtgctcaatggaaaattgatcacaaaataggtattccttaaaatccccaaggacagggaatagtggagcaggcccatagtgctctaaaaaggcagctgcaaagataaaaaggggatagctgtgcgcctagtctccaaatgatgcgttaaaccacgcactgtttatcgtaaactttttaaatgtggatgctggtgagcaatctgctgcagacagattctcccatgccagaacttgggcgaattttgctcaggtccaatggagagattcatgtaccagacaatggaggggatgggaccccctgattatctggggtctagagcatgtctgtgttttctcacagggggagaatgaggagcactggctaccggaacggttggtgtgatgcgtggaatagagaaaaaccggattctgtgtccacaggagaggatctgaaccagctggagtgaaacactgaacctttgttcctgaaccttgaggacatccgccctacagcctgaggaagaaagtagacagacacccagttccagtttcaccatgctttccagagccccagcttctctacagactgactaatatagcatccatgtgtttctttgatgctgtgaagggtggcaggacctggtcagacaagaacctccacctacagaaggtcacaccggtgaaaatttgtgcttggtgtgaggtgggtgaatccacttctagtgcagacttttgaggtagggagacacaggccttcaattcgggtcttgaggcaggaagacacattttgaacatgggccacctgctgccatatgtgaggacgaggaagaaggaagctcttgctctttgcctgcttgctctcaccatgctaggaagtcctttcttaccctggcatagagcagtgtttcttaacctatcagtctctaagcctttggggtcacatgtcagatatcctgcctatcagatatttacactgcaattcataccagtagaaaaattacagttatgaagtagcaatgaaaataactttagggttggcagtcaccacaacatgagaaactgtgttaaagggtcacagcattaggaaggttgagaaccactgccttagagcctacatcttcgggatcccagcatctacagaagaccatctgagacacccagtctcatagattgagcaatttcaggattctgggactttctgttcatagccagtcattgttgcactacctggatcacagcctgaaagtcattctaataaaacacagtttttatatacaaaaaagatacatgctatgagttctgtttctctagagcaccctgacaaacggatatatgatgacaaggaaggacaggatgcaggtaagggggggggggctgtaagtcatgaaaaagttatgaagaaaattgctctctagtctcagctctgccatagggttttcttattttgtggtgaataagttcataaagatgtaattgacagtacaagtctaaaaccataactaaagaaccatgtcttcagaaaggctattccaactgtgtggaagtgcattgagatacatgggttttaggacttggtaagtgttttagttgatatttgaatgtaccacacttgtggatttgcatttaaaaaatccctgagcactcagctaagagctgattgtagacctgaagtcacaagagtgtgtgaccctggccaagtcttgtggtcagacagaatttgaagtccatcaagagctcatcctggccacttctctggggtgagagaaccccatttacatcaggatgaggagtctctgacctcctatctgtgatcgttggtaatctgtactttcctgagagtggccaatacattccagtacatcacacttgaaaagccactgaaaggaaaaatttttgttcaaggtgaaataggtgtactggggccacagcttcctccttggacattaattgtctagagcccaacctttatacaaagaaagtggagaaaaagaaaagatacttgctggacagtggtggtgaattcctttatcccaacagtaggtaggtagagataggtggatctgggtgagattgagaccagcctggtctagagagtgagtttcaggacagcctccagagctaccgggaaaccctgtctcgagaaacaaaagcaaaaataaaacaacaacaacaacacaaaaacaaaaataagaaagaaaaagaaaagatactcatgaggagacaattagattgttgttcctgctggatgagggaccagtgctccctgcctttaacagaagacagacagatggtcaccaaactctaccacactacacatctgtgggcgagtaaactcctgaactgctctggtccagatattattcttggattgaggtcgcccctctccctggagtccaattagagatttgcaaatttcaaaagggtatggaaaaactaaatctgagtcgtcccttcttttatatcccaatgaatagactttctgtaaaaacatatacattttttacagacaaatacattttatgtgttgttttccttaaaaattaaggtttctcaatgttgtaactaattagtgaaccttaagtcaagtccttttggcccttactgggctgataaacttaagattatcatgaaatccagggaaagtaacaggtctacaggtggtgacacttggcctctgtgaagaggtcacctggggagctccctgacagcctcctccacgctcttgtccacaccgcggcttccagtcagggcctggttccttgtggcttgaatcggtctcccgcagatcccgccgtggtgagcgcttgtttgcgcagcccaggagatgatggactgtggtcatttgttcctgtgtgaggagcctgaggacgggaccgtgttgtgagagggaaagcaagtctgtcccctccccacttgcattgtatgtcggcgtggtggtccatgtgttggggacgtttgcgagtgttttgttgtgttgtttgagcaagtgagtgttgaagagggagcaggtttnnnnnnnnnnnnnnnnnnnnnnnnnnnnnnnnnnnnnnnnnnnnnnnnnnnnnnnnnnnnnnnnnnnnnnnnnnnnnnnnnnnnnnnnnnnnnnnnnnnntttttgtttttgtttttctttttccttttgtttctcgagacagggtttccctgtagctctggaggctgtcctgaaactcaccctgtagaccaggctggtctcaatctcacctagatccacctatctctacctagtgctgggatcaaaggaattcaccaccactgcccagcaagtatctttctttttctccactttctttatataaatgttgggctctaggacaattaatgctgagtcagggtaactgcctgaagagaccatactggtttaaggactgctttcagggcagccaaatttgccaatttgttccctggcccagatgttgttgttgttgttgttgttgttgttgtaatttatttatttatttatcttcagttgaattgcattttgaatttgctcaagtataggcattgacaagaaggaaattgactcatagaacaaggacatctgatcaaccatgttcatagcagcattgtttgtaatagccagagactcaaagcagcctagatgcccctcagccgaagaatgcatagagaaaatgtggtgcatttacaaaacatgtagtactagtcagcagaaaaaaacaatggaatcttgaaatttgcaggaaaatggatgaaactagaagaaaccattctgagcgaggtaacccaatcacaaaaagacaaacatgatctgtactcactcatatgtggattttagacatagagtaagggattagcagcctccaatccacactgccagagatactaggaaacaaggaggaccttaagagagacaaactttgtcccctggagaaggggaaagggtcaccatcctctgagaaaattgagaacatgggaagaggggggaggaagctacgagagtgagaagggaagaaaaggaaggatgcagaggtcatgaggaggcagaaattttgagtcaggtgtagattagaagaaaggacagatgacaggtaggattttagttggggggtggtagaggaggaagggagaggaaaggaactgggatcgtcatgtaattcaatcttgtttgtaattcacatatatatatatatatatgaaatgactctagttctacaacatgaaactgagagctctctaaagatgaaaaaaattcagaaccatctgagtcttacagaagcgtctattgaatcacacagaagatcagtctcaaactatggatatagcaaaattgtcttagcttactctttaacagctcctgtgggcccaattaattatcaaagaaatcctgttttaataaatgtatatgcatgaaaaaaataaagaaaaaaagaaggaaagtaacggtatcccggagagaggggatcctgccgtaacactgcgttagtttaaaaacaaatatttatagaaagtttggtagctacaaacgaaagttaactggagagtcgggtaaaactgggaaggaaaaagtgtagtccaggctggcctcgaactcagatccacctgcctctgcctcttcagcaaatactaccggcctgcgccaccagagccggcgatacaacacaccgacagcttcctacttcaagccgcttgtggatgacgtaacacgttcagcctatactcctccttcggagaaaacttcagaccaacacctcaccgccccctgacggaccttacaacaaacacaccgactcacaacggcctccaggactcccgacaaacacaacaaacacctcaca

SEQ ID NO: 41 - DNA, 83123 bp, Cricetulus griseus
  >scaffold_54 dna:scaffold scaffold:CHOK1GS_HDv1:scaffold_54:2219944:2303066:1
  misc_feature 5904..6003: /note="n is unknown"
  misc_feature 13094..13123: /note="n is unknown"
  misc_feature 22032..22131: /note="n is unknown"
  misc_feature 25228..25327: /note="n is unknown"
  misc_feature 46683..46782: /note="n is unknown"
  misc_feature 51590..51689: /note="n is unknown"
  misc_feature 61767..61866: /note="n is unknown"
ctactgatcgatagacttttcttatttgagaacccagcagttcagatatcatattactgagctgcaggaggctggggcagcttattggtaatgcataaaggattcccatgctagccagccagagacagaatggaaaggagtaaagaactgcccttctgcatcaagtggattaaaaagaatgccagcattttatgccgtcggataattgatctgccaatattcaaaagttaatttttaaagtagaaacatcaaatgatattgcaatatgtctcatgaaaatttgtgtattgtcgctaagctttcatctttgagagtgccctgccatcttgtggttgtagatgtttctataacagagacccattatcttaggcttagcccaaagaactaaaacaatccgccccagagcaagcgcttcaaagaggcttttaagcccattttcaaagaatggaatggacattagagaaaggaaagaaaaacattttcccatgtctcttcatgtgcttatcaacttacctactttggagacttatgtatccctctctggcctggatgtcaccgtgtagatcaggatggcctcaaactcatagagttgcctcagccctccaattgctggaactgaaggcgtgggccaccaccccaggctcacccagctcttggaacagggcttcacgaccttagacgtctgcttgatctcaaaatgctctatgggtgtgtttagaatgaatcactttctactctgttgtattggcgagaggggcggggggaaagaccctactgtgtctaccaaacattctcgttcaaatcacgacaaaaagggagtaagtgaggctgtaggttcgagcacactaactttggctggtttctagaggacaggaaatactgtgcagagagtagacgactgagaagggaaaaaccacaaatcccaggatgccaaagtgacagcctacaactcccagcatgctcgaggaataacagggcgactgcgcagattggcgcgcgggtgctcctgggacgtcagcatggcggcgttcgcagatttggacctaagagcgggctcggacttgaaggctcttcggggactggtggagaccgctgctcaccgtgagtctactggcttcgccccgcgagcccggcccctcgctgcccccataccaccggtttgcttggtagtttttccaggccctattattgggtctctcgtgggattgcggcatttccctagaggcaaatggtagttgctatgtctcccggatccctggcgtgtgaaactcacaggctactgaggaagctgccgttgcctgggcttgcacagtctttccgtgcggagggagagaacagaggccaaaggggtcgaggtgttggcaagggggctgtgagctgatgaatggtaggctctgggactggactccaggtgtacagtcccctaagccggtgggtgcttttaacgtcagtccttttgggccccgacgacatctgacaaatacagaaagctgggtcgcaggcaggaactgctgtggactcttagagaatggggagggtgttaccttatttctcccgagttttaagttccttggggatgagcattaatcatgtgtgctgtcgcctgccatagggtctgtcaaataatggatgctctaatagcttgaactcgggagttattagactagtttgccattaccatgcactatcttttatattaatactctatcatcttgttggtctttagacaacttaaagacaagagtcgtgatttagatgtgttggcgacagaggcacttttccaagcagtgctaactgttgtgaggataaggcaaaccgtcgttttccctgtcttttactgtagagcacctcaaaagaggtgtaagggattcgtccttccattgcaccttcgggtaagggaggaaatagagcatcgcagaagaaatgaatgataatgaaggtgacggaaagacacataaacttgatggaataaaaatgaacaaaggggcaggaaatcctgagaatattgtttggaaagcagaaacaaggtgtttttagtgttttgctagcataaatcacagcctaaatatgtgcctggcactcttctaaaatgcttaattttcatgacactctgaagtgctgtctgctgttaacatcacttgacagatgaacaacctgaaacataacagtaaatattattaaaccctcttactttccaagtctagaaacagaatccagggctttgtgtatgctaagcaagcattctaacacttagctacatccctaacctcatctcatactcttgaacaagaaagaatattttttaaataatctatttttttttcagttggatattcagttgttgccatcaatcatattgttgactttaaggaaaagaaacaggtaaaataagatttctctgattaattagtaaataaatattaagactttacaagcccagcagtggtggcacacgcctttaatcccagcactccagaggcagaggcaggcagatctctgagttcaaggccagtctggtctacaaagctacacagagaaaccctatcccagaaaaaaatatcaaaaacaacatttacaaatatttgtatttgtgttgggaataaggaactagaaatgtggacttgttgcaatgaccacatacttaacaaaaacaacacaaggaaggaggagtttattttcttatactttgaaggtatggcagcaggagcatgaagtggctagtcacagttcctcctcggtcaggaagcaggagatgaatgctggggctcagctcactttctcctttttagttagttcccttagaactccaacccatgaaatagctcagtttgcattcagggtgggtcttccctcctgggttaaccctttatggaaacaccattatagaaatacagaggtgtgtttccatcatcatttctaagtccagtaaaattggtagtgaagcataagtcatcacaagcatgtttgcgttttgagacagaatcttatgtgtcccaatctggcctggaattcaactgtgttgccaacgaagacctcctgctaagattacaagcccatgcccagtttatgagatgcaggggtagaaggcaaggtggtgtgcattttagaaatcactctacctctacttactgagctgccatgtggcaagtcttctctgtactgctagctcccaaatagtgagacttcttattatgaaaacttggccttagctgagggttgtttctaactagctcttatgacttaacccatttctgttaatcatcgtgctgccatgtagtttatggtttttacctctcctcctacacgtcatgcttcttctgagtccagctgtgactcccccttcttcccagagttctctctgtccagaagtcccacctataccttctacatagctgttggtcatttaatatttattaaaacacagtgacatatctttacacaatgtaatcaaataccttgcaacactgtgtctccaccctctctactcactgggctgcatccccaaccctcaactatacttctttaaaaacaccctatgcttactcttttacagtaataactgaactaatatatatcatacaaattcaaagatgtttaaaattacattgctgttaaatgagctataaccacgatatcttgttaccatggtcttattaactcatttactgatttttttcccatttatttatttatttatttatttatttatttttccgagacagggtttctctgtggctttggaggctgtcctggaactagatcttgtagaccaggctggtctcaaactcatagagatccgcctgcctctgtctcccgagtgctgggattaaaggtgtgtgccaccaccacacctttaatagactatcaaatacatatgtatgcatacttatttttaattaaacaactgtaccttataggtcatttctgtctttaaaaattgttcttatttttatcctctggtgttctgagcatcttctctgctctttagtttctttccttaagaaagaaaaaggctgtttagtacatttgaataccagaaattagctttttttgattttttttttctgagatgcccttaaagtgttttgtagtgcttagttctttaacatgtaactaggattgctgtttatcatttgttgtaggaaattgaaaagccagtagcagtttctgaactcttcacaactttaccaattgtacaggtaggcgttttagtgtttaagtgtagtgtctgcccatttaattcaaacatctcgccttcctgtggtgttctctgctttctgccagtttcaccttcccatcagggctcgtctcttcatcagtttttactgtccatccgaactttttggtatccttcctaaagtcccacagctattaaattatctcattgtgtagtttactagatgtgcgtagtattctcttctgctaatatatattcctgtagaacaagcatgctttgttgatctgtaccgtcctctgtaaattttactattttgtactggttaaaaaaagaaacaaatcaattgcattttatcttttttaataatgtatttttgtttatagggaaaatcaagaccgattaaaattttaactagattgacaattatagttacagatccgtctcactgtaacgttttggtgagtttgttgtttttctacatttggcttctaaactatattaactaacattgtcacctgtcatctcaccctgttcttccaccacctgtaaccctcaaacccatgacaccttcctgctttccctgtgtgtagaagccgcacaatataatgtgtctcttacaaaaagttagaaggtgccagcaacagaggagaaatgtcatcagttattccagcattcacagattatacattttgaatgtactttttcattctcatatacagtatcaagtttgaggttttccctgttaagcagtaactgtgttttactgatatattctcctttcctagaacagaagtattttcttatacatctggcattttaattttattgttcagaattttcattgtgagcttgtgtgtcacagtcatgtgaattacccacaacacatgaagtactttagctatatctaggaaaaaatgctaattccactgagggctgtgataaaacaccatgaccaaaggcagtgtgggcaggaaagtgttgatttcagcttacggttcatcatttcattcaaggaagtcagggcaggaacttgaggtagaaaccgggagggaagaactgttgcagaggccacaagaaacactgcttactggcttactgctcatagtctgcccagtctgctttcttatagtacccaggaccaccatcctaagagtggcattgcccataattagctggccttcccacatccatcatcattcaagaaaatgcaccacaggcttgcccacagggcaatctgatgagggcattttctcaattgaagatccctcttccccaaatgcctctagctgtcaagttgacatgaaattagccagcacagttgacctcttgtcagcttcacacacaaatacgtcactgttaaaccataacttttcctttcttgctcatccccagaatctcatatatgtaatagtgtataatataaaatattctaatttttagaagtcccacagtcttaaaaattcaaacattttaaaagttcagcctctccaggcaatggtgctgtacacctttaatcccaccactagggaggcaggggcaggtgatgtctgtgagttccaagacagccagggctatacagagaaaccctttctcaaaaaaaaaaagttcacgctcaccaggcaatagtggcacatgctctcaggatctcggagttcaaacacagcctggtctacagagcaagttccagaacagccaaggatacacagagaaaccctttatcaatttannnnnnnnnnnnnnnnnnnnnnnnnnnnnnnnnnnnnnnnnnnnnnnnnnnnnnnnnnnnnnnnnnnnnnnnnnnnnnnnnnnnnnnnnnnnnnnnnnnnaaaaaaaaaaaaaaaaaaaaaaaaaaaaaaaaaaaaaaaaaaaaaaaaaaaaaaaaaaaaaaaaaaaaaaaaaaaaaaaaaaaaaaaaaaaaaaaaaaaaaaaaaaaaaaaaaaaaaaaaaaaaaaaaaaaaaaaaaaaaaaaaaaaaaaaaaaaaaaaaaaaaaaaaaaaaaaaaaaaaaaaaaaaaaaaaaacaggttggagagatgactcagggattaagagcactagctgttattccagaggtctgaattcaattcccagcaaccacatagtggctcacaaccatctataataggatctgatgccttcttctggcataaaggtatacatgcagagtgctcattaaaaaaataaataaatttttaaaaatatccaaagtctttctcaaagtccaagcttctctaaaatatccagattctctgtaaaactcccaaaactcaaagtctcttaactgtgggctcagtaaaataaaaaaataagttatattctttctgactccaagaaaccagggaatcggctgtctccatgtttccttttcccatacacataaggctataagccctttctagaacttagtcatatttatggggggaaaagttcacccattcatacataaattaataactttgcataatataaagctgtcttggaatttactcttagttctatttaaaaaatgtagcttaatatttctctgtcttctctgaatggtttcaaatctggattaaaagggatctttgttccctaaaaggccatgatagtggcttttaagtatatgttctcctttgttgagtgagtgttgtgaacacagggacttgcagccagatgtggtaactcagaccccagcactcaggaggctaaggaaggaggactggtttaagtttaaggatgttgaatgttgctaggtgaccaggcatctgtttatatattttgctactgtgtgataacattcattttgtcttacagagagcaacttcttcaagggtccggctgtatgatattgttgcagtgtttccaaaaacagaaaaactttttcatgtaagtgacaggtgaaaaaggatactgttttcccattatgtaagtctattgttatgacatagtagatgccctattcctcttagttctagtttcatttatgttgctgtgattcaaataagtggacaaaaagccacaagggagaaaggattagttactgcccatcattctggaaaagccaaagcaagaatttcaagcagctgctgataacagagcagagaggtatgcatgtgtgtgcacttggttttgtgtgcaacagttcaagaccaccatcaccacccccaccccctgcctgggaaatggttctgctcacagtgggctgggtcttccccacattgattgtcttaattaagataattgctcatagacacaatccatggccaactcaatgcagatggtccctcagtgagactgtcttcccaagttaaagagtttttctaattatttatcaataaaaactcgggagtcagatatcaggtaaaaacctgaatgaacagagaattgacagagacttgagcagtgattcccctctctctctccttcctagatccaaaggggccaagaatccttctaagccctgccctactacttcctgtgtctctttacatgtcctcggtcctccaaaacctctatggctaattttcatcaactggtagctagcttggcattctgattcaaacttaattgcagtcgggatggcggagtgccatcaaaatatcccacaacaccgggtgattctagtttgtgtagtgtttacaattaaagctaaccattacaagtcccacctggaaactattagctttttctgtttgcactcagagttctgggatttcataggggcatatatgagtggcatgctggtttggatttagtcatcctggtagacatttgatggattggtgtgaaagagctcatgaattttctcctgttcctttctctatgctttgttcagttaaaatttctccttggtaaattcacccatgtccactcagtaaccacttcagtttctggccttatctacttctgcctgtgagagaagaaaaaggcaagcctgtctctggtccagctccctctgcaagctctgaggtgtaacccatatgccagtgtaagggtcatcccttagttttccagaaactcctcagaatcaatttttgagagcctttgtgaattgaattccttttgttcttttagaattgacctgttgatttttcagacaagaaggaacttagcacatggactcatttttgtctctatgatagactgccctgttcttgcaaatgattacagtgggggaaaaaaactgaaatactcttttaagtaatgtctttataaggaatgctcaggaaaatgaggtataattaattttagatgtagttatgaatgttctcctaaactaatctcaaaaaggatccatctgccaaaacaatattgcaggaaaaaatactagtcgtacatttttttaattttacaccctttttttaaggtagtatttttctttttagattgtaatttaattagattgttctctttccttttctccctccaaaccctcccatatacccctccctatgctctttcaaatttatgatatttcttcatttctatcgaatgaatatacgtatttgtatatacatatatatttctaaatgtaacccattgagtccatatacatatgcattatatatttctgaatataacccgttgagtccatctaaatgttacttgtatgtatgttttcagggctgactgtttttcaagcaaaatttattctaaagctgtagacggatcttttttttaccctaagtttatccagtagagggagccattgactacggaggctgatgcagtgtctcagggtttagcagcaactgctaattaagttagtagagagaaacaccacaccacagattgtccaggatgcctgtgcgtgaacacacacacacctcaccacaccacccatttttggtggcttcttttatgaaataaaagattatattaattctcaagtattttgttatagattaggaatgagtagaagcaagtacttaatcatcaaagacctgtggaccaggtatggtggtgcaggcctttactgcctgcactccatcaccagcacttcagaggctgaggcagatggagctctgtatttgaggccagcttgtttacattgtgagttcaaggacagccaccacacctgacagggaagtagctttataaagttctggtttggtcctgttcctgccatctttcaagccttgcctgtgcaggatgctgttgtagaatgtctgcacgaaggggacatctctgaaggcagcatctctcaagaaacagtctaagtctttcagcttcagatttatctgggattattattaagttacagatcattaggtcttatttactgaatgaatctggaaatataggctagccagccatttgatagtttttaggtgaattttgtgcacgtgtacagttgagagctactgcttatgggcatctctctgccttggcaagcctgacttatgtgtatgataagtggtggcaccaataaaagacatccagcgtgaaaggttggctgagccatactctcttgtgccttgcgttccacaacagcaaaaatcaacatatgtttgtacatttttgtggggacaaacttttaaaccatcatagatgtctctgtccctccaagaaaaaaaaaaagttaaattcagatacagtctaccaattttcagccagaattgagatacttagctccaaaactattttagacataattctgtcattttaatgctttggggaatgttagattaagcctccccagtgctaggaataagggcatgtgccccttcttcacatagttctttgaatgaaccagttggacgtttagattgatagaaagttaagtcacagagtactttggaacatcttaaatttaagaggtctcctctgttgctgaaaggtctttacaatgcccgtccttcaaccagtgcagatcgcttgtttaactgcctcccccataggagagaggaagaaacaaaaaaatgtatgatgagaaggagcccaattcacctttagtagggaagtcatttaaagtcttcttttcattaaacctaattatgttcatgataataaattccaacaccacttaagtctatgtataaaaagcatgctttcccagctaaaatttctccagaggaagccaatactttcttgtgcatctcctcagaaatgccgtcccccactaaaactcctttcttgttaactctagaagcaaccaccacaggcattcttttgttatttttcagaaatatttacctacttctttgactcattgtccactgtttatccctctgtcttcactgtcaccatactttttgtgccttataatatgtgagttctataactaaatgtacctcatcctttaaaacattggcacattccatcctataagagaccaaggggatcataattacttaagtgaaatggaaagttttttattctgtcctctctttgtgatggtctggcagtgactgttcttgcactattgtcttggcttgtgtggaatttatagctatataatataataaagtcccagtaaaatatatttctataagtgatagtgcttgtccgaacgtgaattgttaatatttactagggctgtggctcagtggaggaagtaaaatgttggtggctcttgccatcgtgctcttcgctgtgctcctgaagatgaacagatgctggagtcagctcagctctgaacctctgcagaacctcgattcatttttagcaaagtctctgttgttctttgtgagccagacagctggagcagttgggatgggcagattctttaggagccagatattcctgccaaacaacatagtctcccaggctcttaccatgtaactcttaccatgtaactatgaccatcttcaaaccagatggtctctgatgaccactaagccatggggctgggacaagaatgacagaagctggcattctgaggacaatgggtgagatgtgacatctgtcactgctgaagaactgcccttcctacaggcattaccaatactttctttcccttgctcctcacaccgtgctttcccctgttcttgctacagacactggcttatcaggtttgctcttgaagcccatatgcatcagtattctaagcaggggtggggttttttgttgttgttttttttttttaatgtgtattagtatttgcctgcatgtatgtgcatgtatgtatatgtatcacatgtttgcctgatgcccacagaaagcacaacagggtgtccaatccccttaaactggaattacggatggttgtgaaccatcatgtgggtttgggatctgaacccaggacccctgaaaaagtaacaaataaatgctcttaactgccaagccatctcttcagccccagtggaatattttcaacatagtacaaaacagccagtgtttttgcctcgaaatcaagtaatgtctgaatgattgctgtctaggcctgtcccctcagtatcttttgacttgcactccataatctgtgcaccaatttgctttcctccctaacttttctatttatcctgtttgccttatctgtttcatttcttttgtatgtggtttatacagatattttcaaaactctcttagagatgagtacagagaatcctctcagctctgctgtaaccctttgctaaactgtttctattaggatatgagcaaaaggccatcacccacaccatgctatttcgcagccacagtagtccacttggaactacagcctgaacaattcctggtggaaatgtgctcggtaaatagcttgtgtaaaagatggactggcatgcactcattatggctttccagtccttggatttcacaacagttaccttctgctttctgaaataactaaaagtaatgctctagatactgaccccaattcagcagctcattcatagatacaaacttcatgagttagcgggccttcaggctggcctgaaagaatagcagacactggctttgtaataggtttgttacaattcaacacagaaccatcatgatacctgtggagtaagccatactgtttatgtttttgtatataaagtatagccatgtctctcattcctgtgcatgccaattttctgttaatctatttttcttcttgacaggttgcttgcacacacttagatgtggatttagtctgtataactgtaacagagaaattaccattttacttcaaaagaccccctattaatgtggtaagtgcatttctttctgctataaacttgaatctgtagacactgtctgcagactagaaaagaagcagaagaaacctgtgttcttggggcctgggtacttagtaattagagcagattcagaaaagagaattttggttttctaagctgactaaaagagaaagtttacaatagaaagtgtctaagctgggagctgtggggtggctcagtggataaagtgttcactgtgcaagcatgaggctaggaggttggatctccagcatccacacttaaaaccaggcagcatgacaacaggcttgtagtctcggcataagggaactgagacaggagcaatctggtagctagacacactgaatcagcctgctctgggttcaagtatgaggcctgacatctgatgtctgcccctggcttccacacactgtgtgtgtgtgtatgtgtgtgtgtgtgtgtgtgtgcgcgcgcgcgcgcgcgcgcgcgcgcgtgcacacacgctctctctcgctctctctctcacacacacacaaagaaaatatttaagctgattgtgttggtactccaggctactctaataggcacttgacccagaagttcaagaccaacagcaacacacttgagaccgcccctgcccaataataataaatttaaaaaggatttggttaactatcagggtactgtttttgaaaggcctaggaattaaaatttatgaagaatatttccagcttgatatttaacaatgatagatatttaaaacctcaacattacattaagatggaaaaagttaaaaaaaaaaaaaaaaaaaaaaannnnnnnnnnnnnnnnnnnnnnnnnnnnnnaaaaaaaaaaaaaaaaaaaaaaaggccaggtggtagtggcggtagtggtgcacgcctttaatcccagcactcaggaagcaggtggatctctgtgagtttgaggccaacctggtctacagagtgagttccaagataacaaggactacacagaaaccatgtctcaaaaaatcaaaacaagcaaaaaagcaaggaaacgagaaggtaaaaaagacagagtccttgaaattcataaaaatcgagatacaaaaggaaatggtgtgaagtcaccagggactggtaagtgaagtcactgtgcacggtgacctgctagcttccatggtgagtgaagtcaccgtatatgctgtggcctgctagctcccataagaaccactgcaatagggtagcctatgcgcagggatccttttattttccctctggatatagactttttctcatataaatttctctttttcctatacctttcatcttctatccgccatattgccttctaaggctcacaccccagcccgcccccactccaccccctgtttccattaaagaaaggtagtattacttcacaccagtaactgatacagaagttatgaggtcactgcagctggtaactatttgctttgatagccagaacatagaaatattgtttagcatagtgacttccagaacccagttatgttatcaaaaactattacccaaggaaaggtttagcaaacattccaaatcccattctgaattatgtcagaattcaaataccgttttcaaagtagacaatcgtcttattctgaagtctttgtagaattatttttttccttgcttttgtctcccttttctcctaaagaatttctgcttgagctgggtgttaggggcaacagtgagggtaatgtaagctgtttaatgtggaagatataagatgacttatgttctaaccctaggcgagtactactaaggtggtttttttaagtgccaaatgtgtaaggagaatacggaagagctagctacagaacctgaaccccaactgtgatgatggtagcacttctaaatgaagacatgaacgttctaaaccccaggcaagcgtcacccttagacttggggatctatgttattcagcagatcatttatcaaaaatgaggaatgaaatctgtcaagttatctggcttcagtcacaggcttcagacaggtctggttgtacctgtcaggtaggacctgtgtggtccacacaggggaacagctcccaagcgcttggtacctagatactattaggtacaaaggacctacatttatggtcatcctgttggccttttgtgttgaaaaggcaatctctgccttacaaatctatctctaccttttaccagtctcagactgcgtgtcccacaaaatagctacctagaattagacagcacagccactgtgtatattttttgttaaaattaacaacattttcaccttaataaactaggaagcccattttctaggcaatttgcctgagtaaccttatgcagagttctgtgtccttggctgggaggaaatagtgatatgtggacaaaatatggaaaggagcaatgtacaccatataattcctcgtggcacatggcagtggtcagattcctagtgagggtttatacttcagtctcttctgaggaagccttgccatgaaagcagcctctgagcttccatagtactccagctgtgcgaaggcttttctcgataccccagtgctggcctgtgagaccttcctgaaatatgctgttgaatcagtgtatctaatttaaattagcagtcagcattttggggagtctggccaagatgcttgcttttagacattaggtcgatgtcaatgttgcataagggcaatgggtactagggtagcattaggagagtggccctcgaggcaggcaccaggacactaacacctgccaattacgtctggaagtgcagaaaagttgctgttgagagtgtctgatatttctgacatgattcccacatttttcacattagacattctgaaaagtaaaaaacattgacaagtgggatatgcaatatttaacacagtgtctactttataaaaaaaatccagtatgaacattttacatatgttgtttaataaaagctagatggaggtgtggacagaaaggctgcataagattacatttagtcttcatctggtataggagactgcagtgtgagctgaccaggaagcaggttaatttattcacttactttcatgaaagagagaaaactagaaacagatagccatatttttgtttggggaaaactgcactgtagaggtacagtaagtacatcatggtaaaggctgtggtgcatgtccaccatacacacatttaaaatttaataaaacaacaactctcacttcatgatggccaggaaattgagaagaagaaaggacaagacaagttcctcacattcttcccagttgcataccccaaaagacatttcttcttcccttgacgtttgttattttcaatgctgaaatgtaacaaaagtaatgtaatggagaaaggatttgtgtctgctcacagtttgtggaaatacagcccgtcatggttgggaaagcaaggcagcaggcagctacatggtgacagcatgcagccgcaggatcttccatggagatgcaggacacaaagcaagggagatgcaggacacaaagcaaggtagtctacaaaacctcagtgacccacttcctctagcagagttctacctcccagaacagcgccaccatctggggaccaagtgttaaatatactgacttacgagagacatttacacattccaaatacaacatggccacaagtctgaaatcaaggtgtgagcaggctgtactccctctaaaaattattaagggagcctttctttgagtcttccaaactggtggtgatttattagcaactggtgcctagctgccacagtaacaccattctctttgtcggcactgtgttttcctatgagtctctggccattttataagaacaccaatgagattaggagcctgctgttttcagtatgacctactcatcttgattacacctgtacagactatctccaaaaaaggttacagtctgagatctgaaattctacaggtcaggaatgtaacatcttttacaggtgggggtacagttaagctcacagtacccagctgttctattctagtttttatctttcggataatttgaagcagcccacatctattagtaaaggcttactaaacattgtacctctacagtaaatgctaagcagctgtaaaagaaaatgaaatttacaagctgacatgggaaaacttccaaatcagtcaagataagaacttaacaagacaccttttaggtaagaagaaggaaactatggtgtgtattcatgttcgcttacatctgtgtgaagaagctagaggaaacataagaaataaatgaaagcaattacagcagtggggtagggcagtgagagcagatgcaaggaggacctgctgttccttctgtatctttgatcagtgagtcagaagacaatgagatcctaacaaatgacacaccggaaggctgtctaccccaagttcagcgtaggcactgattcttaaggcaagcaatcagcgtgttgccctggaatcaactcttggtttcccttcttccttctccaaagcttagcttaagtttttagtgcttagaattttattatccatagctcctgatctaagtgtcaaatgctgcccttcgtgacatcattgtgactattatttctctttagtaagaaaaaaatctcatcatctgcctattcaggcacttccattcagacatgagaacagaagccaatcaggcaggcacgctcattctctgtaaagacattattatgaacaatcatacaatgagcttacgacaatttacataaaatgctcttaggagcaggagaccaggtaatgactgtgttttattcatctaaaacagcaaagttatatgaaagaaatattcacagccttcaatagcacattatctttaatttctttctcaggagtgttcttagcaattttaaagtgaacctgattaatgtaccaagactagaatcatatgtgaaagaaattaagctggcaattctatcctgttttcctccatcctctccctcaaaggggtttttattttgttgtgattcccagacaggtttaaaaatttaaattgactcaactagaaacacttagggatctgatcattcaacaccacactgctcacatcctttattcctgtcttcagcctactgccctgtggtttacttctgcaactagaagggtggggaaatatgagtcagactctttgtctggtagctttagcgaaagaaatagctgaggagataacttgaaatggccaaagagatgtttttatttatctgtggatttccttcaccaagtccatcccagttccttgatcatccacagtgaacaacattgtcacatggccccttctccacaagctacagtcagaatatacctgctgctgatgctgctgctgctgctgctgatgatgatgatttgaattagaaagggagttgtaccagccctgagaagtataaatctaggcagggaaattaggtgtttgtttaattacagcaccaacatcgtggcatctagatctattcctagaaggaatgcaagccagagaattagagatggggaaaaagatgtccaaagaggggagagtagtgtttaaatttcagctaaacgtagagatgtaggaaaatctaaacactgctagccgtaagatcagaggacaaaagaagagaaagaaggtgggggtgggacatggaaaaagaaatctgttcaagaaagaatagaaggagcttctagatgacttcaggtcggcgagaccagtcccttcactccctggcgaccctgagtagtgaggcccatagagcctcaccttggagaccaagaccatctttcccgagtgagccagctatcctgcctttacttcagagagccaccataacctgcatgagtttggcaagtttctaaggccttagttcttaccacaggactcctgcgcttccttctccagcctctggccttccctccatgctccaggccctgagcctgtttgttctcttccctctgaaagggctcttcatccactgtgcagttgcttcatttctcttcattgaaaacctccttgctcaaatgtaccagagctctgagaagggctccgctttgtcaagtaattagtgctttaaaacaaatctgttatgaaaggacagactgttgaaacttaagaaaagcagtgcatgagagaaagacaccatgtgacaatgttcaagcaaaaaggcttttttttttaagggatcacaaaaagaggagaggtgagaccagcctctgaggacaggagcagtggaagagaggaaagagaggcagaggcagaaggagagagagaggatgggaggtggggaggactcttttaaaagaggacatagtgaatgtgcacaggtgatgctcttagtgatgctgcagctgagggcgtatcctgtcagaaccccaaggacaggccagcacagatgcctgaataccaacacagacattgcatcctttaacctgggaaactgaattgtgtactggtgaatttcaatcccactcccgtgctttgcagactttccactcttaagagaacactaaatgagaaaactttcttcctcatggaaagaccaagcccatatggcaagctgggcaaaaccctgagggagcagatctcattcacctttttttctgaactacaatgaaccttaaacagtattacttaaacagaatgggctggagacatgtgtgtaagtcccagccacagttcttttgcagtacctcaacctcatttgttagcacagttcctcagacattcggttagcatggcattgttctgtcattcaacagtaaatgacttagccataaataaggtttcccattcctgctcctcaaccccttcagatgtctcctccttccccttcattctctggtcaagttgctcagctcactgttggttcacacttttcctgtatgtgggaagcacatctttctccttggatccctcgtggagtagtagccctctgcaccacactgacttggctgctctcagcctctgtaattcctgcttccgtagtttccctcccacagctaacagaagctctgtcaatcaagtagagcctcttgtctgtcttcctcactttggataggggtgcaggggtgtgggtccaccgcctctgtttaagccattcccttgctatgtaggaggtgtacatagaggggaggaaggaaggtggggagagacttaatgtgtttggctttgacagtttacagtttatcttctttatttctggtgaaggcaattgaccgaggtctgggctttgaacttgtctatggccctgctataagagatgcgacgatgagaaggtacacaatttccaatgccctcaatttgatgcagatctgcagaggaaaggtatagttcctgagacaaggacactttttacctctggtggttactagtgatgtgctggtgctgtcaactccattcttagccttaagcagaaaactctcaagacactaaattccttcatttcaatgagtcctacagggttttgtaaaaactccccagggaagagtgagatatggaggggaaagatggctgaaagcctttatttttgataaggaatttgcagtttgcctcaatcaaagacttctctaaataacagttatttgtctctgagtgaattaaagttacagcttttaaacttgatttatctgcactaagatttgtttatgaggcttactctgccttttgtattggctgccttgagtgtgacatgaagagcttcagtatttccacattcattatttgtctttaaaagaagttggtatttgagcctcaattgctggtcattcgtattatacaattcaattatttttatcagttatctaaaaataatgttgcttactttctgttttatagaatgtaattctatccagtgctgcagagagggtaagtgtggagtgtaggctttgtcttggtagttttaaaacttcactacgtttttagaaaaactgaaataacagtgtaacgtattgcctatttgtgatttaaaggcatttgcccatagtaattgataaaatgtatcctgttcatttgggcatcaggtgttgcctatatatatttatagctgtgggttaattagaataaagtgatttttattttaccctttacttaattaaaaatactttacatgatttatttatactttaagaaacctatcacaattataataaccttaaatcatgaaattttagatagttttatcttatttgttataaataattaaaatgttaataacatctcatttatttttttattttagcctttggaaatccgaggaccatacgatgtggcaaacctgtatcctctcaatgttctttttaaaagcttgagttcatattaggtggatggatgcatgtgtcaatcagaaaattactttcagaaatcagttccctcctgccatcttttgggtcctgaatatcaaattcaggccatgggagttggcagtaggcacctttacctgctgagtcatcacactggactgggattttcccttagaaaactgaatcaaaaatggcattagagtttagcctgatgttttcttaccctttagttgtaagtttactgctcagtagcctcagaagcagattacagcagactgtaaacttcatctttctggttttggataaagtggcagaagagagaaacaagggactctacatgataatgacagttaggcgagacttagagtcttctcagatgcaggttttcgatgggctaagggctcactgaccctgtgagctgtcattgtcatttgtgtttgtattgtccttggctgactctgggttgaaatctttaataactctattagagggctactgtttgggctgtctgaaaatgaagccaaggctgccgtgtccacaaattgccgagctgtatttctccatggaggtgagcaagttctcatataaatggtcgtgttatagtcaggttactatcaaacaattgacatatatctgcttttaatatccttccctcagagttcctacaagactgccttttctcaaccagttctgaccatacactctgctccttgtcctcactttaggctttactttctatagtttgcattgcaggactgatcattgaatatgttctttctaacaacacagtgtccctttcctatgttttcagaggcttttaacattcgtcttgcttgcttctctctgaatgggcttgctccctgctgaaaataatgagtttcagacacataagtgggactagtggtgttagtctgacaggatctcaaagcccctcgcttcagatccccctggagggttgtatctagactatggttacccatgagaacgtaagattgggttaatgcgtgtgagaagacccactgtgggtggcactgctccctgggtggggatcctggactggatgaaatggaggacacaaactgagcaccaggttcattaccgtctgctccctgattgtgagtgatgtgggtcctgtctccctgagctcctgccgtgatggactctacccttaaaccgtgggctgaaacccattactctacaagttgctattattggggtattttataacaaaaacaactaagaaaagccgtatgttaaaccattaagaaaaacagaaactttttttttaaatcaaactctaaagtcagtctacagcttttgcttttattataactcagaatatttcatttcttgttttggtttacagggtcaggtatctactaatcatatattttgagtacttttttttttttttaaccaaggtggggtttgggggattttttgggtttgatttttttttttttttttttttttnnnnnnnnnnnnnnnnnnnnnnnnnnnnnnnnnnnnnnnnnnnnnnnnnnnnnnnnnnnnnnnnnnnnnnnnnnnnnnnnnnnnnnnnnnnnnnnnnnnngcctgcacatgctaacttttttttttttttttttttaaataatacaactcctttttatgaaggtctaggatcccaaacccaaggaatggtgacactcacatgtagggtgaatcttctcacttcaatgaaccaatctagataattactctcaggctgttcacaggcttatctggaagttgattctagatcctgtcaagtgattatgaatgtgtatgcaccattttcttaccggctcatctgctgatggatgtctagtgggttctagtcattgtgaacagtagtcaatgaacgccggcactgaggtttgattttacagccgtcatgctttatatgcgtgtacaaactccacagagctacctatatggcattcctccactattcttgctcttttgttgtacttattaggccacattagtgtcaaatttgtgatccccctgcttcagcctccccagtgctgggattacagctgggaaccaccacgccaggtacttgtcaagggttttcattgttacacataaaatgaagagtagatattgctattggaatattctttttcctctcatctctcctattaatacggtaaagtataatgcattaaaaagaaccgatataccctaatttttaacactgagctatgctaacattcctggactggagcttcacaatcctgctgatgtgcttgctgctaagcactcttctaagcacttacagcctcacctcagaagacagctcttcttctttcccttacagttaactgcactgtcttgggggtctttacatcaataggccataaatgcagatatttacaaaaataacaacttgtacttagtctggtaaatttgctgttaaaaagaaattatttccaaagggcttttgttttctttttttggagtcaaatgctttgaactgtactgcaatgaggaaaatcactactaggtaccgagtttctaactaacaggaggaatgcactttaagcacagctcgaaggcagaaggtagtaaatgaatgagacaagtaatttcatgtgagtgtcccttctgcttctacaaggtcagcagtccttaaggaagaactttaactcaacaaataaaagtgtcccccacaatagggtttaagtctttaaaataactacattttggacagtaaaattaaaaaacaaacaaacatgtgtatcaaatagaaaagacattatttatcttcaatatcttcaaatattaaagcatcttactttggtgtacatattgttactcattactcacataaaggataaaacagttttttttttttttctttaagtatatctaaatgaatttaactgttagtattcagagaacacctcactgggttttatttgctgttttagtagtctgaatataaagctgtttttacagactgctagtttctggctttaatgaaaatatcaactcagcagaagttcccttccactgtgaccgatgagctgaaaagagggaggcagctgatggagactgaggccttctcagccctcacatttagctttcttgcaagctggaagacagtcatcatccacttctgatggccgaggtttcttcactgtagaaataatcccaaaagcagttttcctagtttctgtaaaacagaaatgacattgagtgaagagataggatctcactataaagcccaggctggccttgaatccttccacagtccaaccaactctgacctttctgccttagcctcctgagagctgggattacaggcacgcatccccatacctggtgtaagatacaatttaaggagaagtggtttaaccagcatcacccatttctttggcctacagcacgaaaataagagaaccatagagagctctgacaagtgctgatgccatttatgatcattatcttttcccaacatgcacaaagagcagtatttaacatccagtccagtcctaagtattacctcttaagttaaactgcagagcagggcttctccattgctctctccatggcatcttatgcagtcagaaccagccataggcaccggtctagcaactgctttatgtgtggtaaaaagatgaacaaatcacaggcacagatgcaggagtcacttgtactgctcccacagcaagggctgtgctgacctcatgctttggcacatgccatcgccctcagcagattaggatgtacctctcaacactgtgctgtactgaccgaccaccagtgacctggtacacaacatccacctaacaaatgcttgctgagagaacacatcaaaccaaactcagatttataattctttacacacggttaaagtggaattattttgcatgctcaggtcagtttggcagcagagctgaacttaaactgagtcaacctgccttaaaaatatgttaatggggcaggcactgtcatatacagaacatacagatccctaatggtggttttgaaatgttcaaaatgttgggataggtagactaaaaatagacataagaatgaaggcacacaggagaatcaactgcctggatgaactaatgaagcaccatgcacagtaacagtgctagaaagagcacagcaaggaaacgtgggctctgcctcccttgtgggctctgcctcccttgtgggcttcgcctcccttgtgggcctcccattttacatggagacataaatcagacacgagcagaccacgtggaagcggaaggccagaatctaaggaactgtctgaggaacacgggggactaatgggggaggtgtggggagatatgtaccaagggatcaatgtggggtaagtggggagaatatgaacaaagaggacgatgggaggtagcggacgggctatcacaaagaggactaatgggagagtgtgaacagagggactaataactgtgtgtgtatgggggttagtggtggggaatttgcatgaaagggactaatgggggtgagaaaaaggaggctacgtagaggggcatggaggggaatatgctcaaagtacatttattatagttacaaaaatggccttatgtaacttagtacaatatattcaaataagcaaaaaaaaaaaaaaaatcaaacccaaaaaatcccccaaaccccaccttggttaaaaaaaaaaaaaagtactnnnnnnnnnnnnnnnnnnnnnnnnnnnnnnnnnnnnnnnnnnnnnnnnnnnnnnnnnnnnnnnnnnnnnnnnnnnnnnnnnnnnnnnnnnnnnnnnnnnnaaaaaggagttgtattatttaaaaaaaaaaaaaaaaaaaagttagcatgtgcaggcattcatcactttctgcctcctgactagatgctccgactgccatgccttctccatggtggactttcctcagactgcaagctgaaataaccctttctttccttcagttgctttgatctgatacttgttgcaacaatgagaaaactaatccagacatacaatagagttttattcagccataaaaaaagaatgaaatgagggctcctggtcctgctgctagtcctggtgacctgaaccccaggaccccctgttagagggagaaagctaacctgtaacctccacatgtactccattgcagtggtatttatgatttattaaagattgactaagggttcaggaaagcaaagtcagcctcaagctgtagagatcaggcaacggtggcatacacctttaatcctaggactcagggttaagaggtagacagatttctgagtccaagaccacctagaactacacaagagtgaatcagtctaaaagagaattataggtcacacctttaatcccaacattaggaaaataggtaagactgaagcaaggtctcgagaggcattcattctccagccacaatgcggagagttacagtcagaggcttggtgagagcttgtggagacaggatcagcccattcagcctgaggtagagctaagaagctagtggccagctgctttgcttttctgatattcagctttaagtttgagccccagtatcagtctctgggtcttttatacatttgtgttccacaccatgtccctctgctcccccagcacccatgtacccatacacaaagtatagttaaatgttttctttccttttattaaaaataaacttttttttcttacatattatatcctgattatggcttcccctctagtcccagttcttcccactccccttccttcatcccttttcagtctcttgttggaaaacaaacaggtttctaaaggataataataaaatataagataaaaaccaatacaatggaataggataaaaacagctgaaggaaaagggcccatggaaaaaaggcacaagaaacagataaagacacaggcccactcatttgcatgcagaattttatgtatacataaagttcataaagttatgtatacataaaattctgagggaaaagtcctgacaagatgttatgagacaaggaacctccaaaaatgctgttgagttcactttctgttggccatctactgctaggcttgtagcttacccttaagagtagtttatttccccagtgaaactctcttggagggaactaatttttcatttgcaagtggctatcaattggagattacttttgggttagggatggggacataagttcatttcttttagttctaggaccccatctgggacagacccatgcaggcccttgtatgctgcttcagtctctggtttcatatgtgtactggtctggttgtgtttagaggtccttgttttcttggtgtcctctattccctctggctcctgctctctttctgcctccccttccataggcctccctgagttctaaacctaagggaagggatttgatggaaacaagtttagggctgagtcttccaaggtctctctctgcataatgtctggctgtgggtctctatttaccccatcttctgtgggagaaagctcttctgatgatggttgagcaaggtaatggtcctaatatagcagaatatcattaggagtcattttattgccattaaaagaaaaaagtagtatttggtttcacccaaggtacctgggatatctattctcagatttttggtcaccaaagcagcaggttccatttcatagcatgggtcttcagtcacatcagatattggttactccacaagctttgtgcctccgttagcatagcatctcctgaatgcaggacaccattgtagaacaaagggtttgtggccgttttctcctttgatagcatgcaaagtaccttcctgtatcaaagacactttcatgtaggggtaaaagatttatgtaggcaccatcttggcttcttcatgttcaatgatgtcttcagcaatgaggccttgctatcagtttgtggagagcaacctgtagtcttggcaatagcctaggctgtttgaggattcctatgggacccctttggccaacagcttgagtagaagtaactcagtcctgatgttggaagcttcatttggtgacaagagatggccagttggggctctgtctccttcattatttggtgatttcattcaagtcatctttgtatatgtatatcagaaagcttccactgcattcagtttccatactaccccttaaatggcccttaattgtatctgtcttgccctatacccctcccttgtcccccccttcccttccagtccctacttcatcttcccattctaccccatcgcatccataactataattattctcttccccttttctggggcggatttatctgcaccacccccaagtccctgactctatacctaatctgtggttctacagattatagcttgattatcatttatttaatagctaatatccaaaaataagcaaatacatgtcatatttgtttttctgggtttgggctacctcgggatgatttttttttctagttctacccaattaacctgtaaatttctgatttcatttctttttaacagctgagtaatattcccttgtgtgaacgtaccattttctctacccattcctctgctgaggaacatctagattgtttccaatttttgactattgtgaataggccagcagtgaacattattaagcaagtatgatgatgcatactttggggataagcccaaaagtggtgtagctggattttgaggtagatcaattcccatcttcctgaggaactgcctgccacactgtttccatagtggcagtgcaagtttgcattcccaccagaaatggagggtttctcttactccacatcctctctggtacgagctgccagttgttttgttgatcttagctattctgatgggtgtaagatgaaatctaaagtagatctgattttcatttccctgatgactaaggatgttgagcatttctttaagtgtttttcagccatttgagtttcttctgttgaaaattcagtttagataatggtggtgcacaccagtaggatttgctacaagaggtggaggcaggcagatcatgtgttcaaagccagatgtctggtttatctttagcttgacccttggcacagattcctgctataagcctcccctacggcacatggtaatgaagacttggctaggagctctgctatagggccctacaaccacaatgataggaccaggccacttaatgcaaattaggatttgtccactaggctccacaaacctatacattccttataccctggaagctgtctggaggcacaggtctataatcccagctactccggagaccagggggagagggtcacaaattcaaggattgcctaaactacagttcaaggccatcctgtacaatttagggagatcttgcctcaaaaagaaagcaacaaaagaaaccaaaactgtgggcagggatagggtggggctttacagctcaggcttggggcatttgcctgtgtgcatgagaccctgggtttaaaccccagtagtgaaaataataaagactagcagcagccaaattttaaagagtttgcatttgatccagggagaaatggaacaccgctgaaaggtttgaaagaggagagtaattggatcacatctgcattttaggaaacttctggctgcaattaaaacaacagaatagagcatagggctggagagggtctctgcttcacttccaggagaccctgggttcagtccccaacacccactttgagtggctcaaacatcttgtaactccagttgcaggggatcccacagcctcttctggcttctgtgggctttggcacatgcatggtaacaagtacaccacacacacacacatactcgtcaataaataaatcttttttaaaaagagtagtaagcaaacctggaggccaggaggcaggagggatgattgaataaccctgatcttgcaggccttgcctagactggaggccaccggtggcagggcagactctcataagatgtcagcatgattgataagacttggtcacttagggctgagtgaaaatgaagtgaggaacaacttccagaactctccatcggctgttgcattgtgccttcagggagaaagggaacataagacaaaagaccataaacaagagccggttcagggggtagacaggagcttctaaagtcttgtgatagaaacggaattcccccttcaatgtctctcccactgcccagagctggtccccatctacatgctttccttctacactgtctcttctgcctgctatttcttcattagtacaaatgtttcaatgtggcaatgcgaaccttactctgaactctcttctccttttaaccccccagctcttgggctcaaagaagcccagataagacactttggtcacagactaacatatccaagtactaccagtcaaatgtcaacatgagcaagagaaacacgatctggatcccatagcttagatcactcattctcaacctgtaggtcaagatcactctggaccctttcatgggggtcattgataatcatcagaaaacatggatgtttacattattattcataacagtagcagaattacagttatgaagcagcaatgaaaataatttttatggttggagtcagcacaacatgaactgtgttaaagggttgaagcattgggaaggttaagaaccactgccttagagttctgaccaggtgacccaggatgctatggggaaggcaagggtaacaagcgattaggaaagaactgagagaatgaatctgccacttggttctccatgtgagaggggagctttgtgggttgtcagaagacagaagaagccaatagcatttcaaaacatcctcacaactccatgtgcgcctatagctgaaggactagaagacatcttggtcacagaatgtgactgtactccctcacaaaatggtagaggcgtgtaagaggttgatatatgcagtcctacttggtgtgagtttcaggggagcccagtgctggggtttgacatgagtcttcctcaggcatggtatgtcccgagttccaaaggttgcccacacccctgagtttctccactctctcctgctgcctgcagaactctaggcttgaattcatccttcagaatctccctcaagcttgacacctccaagaagtcctaaaaccccggtctacaccacatatggacctctacgctttagacactgagagagcactctagagttccccttcattggacccaaaatggactgatactatttatttctacttatttcttcagtaggtgtctgtccctgtggggccaggacaatcggtttttctcaccaaaggtctttagtgcctcactcagcatttgccaacaaaacttttccttttggaggtcaaaagccattgacccaaaatgttgtctcatagaaggcctttgacccagtcagcgcctgtccacaatacaacgacggataagcccctaatttgttagtcaatccctgatgagaagtcaggaagtgcttgtttaacctgcagtaaccattcttcccaccaggggtctctttttccacaccattggaatgaaggcttctctgtctctgtctctgtctctgtctctctgtatgtctctgtctgtctctctgtctctctctctaatcgtagttctctgcttcctaccggagaaggcagcaggtggtaagaaatgcagattcacaggccccacccgagaccagctgagggcaattcttcagtttatcaagatacctgggtgacccatcagcacagtaagtactaagactggtttctacgggtcatttcttttgttttccgtcccctcctccttcctcattttttattgtttttaatttttatgttaatgtatatgagtgtttggattcgtgcatgtacgtgcaccatgtgcatgcctggtgcctgtggaagtctgaagagagcatcggatgcccggggaccggctttgtggacggctgtgagccatcatgaggtgctgggaactgaactcaggtcctctgcaaaaccagcaagggctattaaccactgagccatcttcccaaatccctagacatttctaatctgaaaaagctgttaaacactgataaataggcatcttcctaaacgactcttcttacatgagaaattcccactgttgcactgacaaagaacttaaaacatggtctagaatttgtttgcatttattatgaatataaaatatacatacagcacaatatacatttacacatttacagtgtctttccttctgcctttgatttctgcccactccctccccacctcctccacctcctgcatttacactcatggaactctctccaccttgggacatcctgtgacttggtaaccaatcaaaccaaacccatgggtgcaaggagggcttcggtgtctgtcccacagaattgcttccgttctttcccccatcaccacacgccttctgttgcttcatgcagttatcagccgtaagaattcagaagagagctgcaatgatcaccctggacatttcaaactaccttgaatagtttctatacgacccaggtcaaaagtgtgcaattagacgccattcacccacaaggtttaagatctatgggaggacgctgaatgctgcatacagattaagttttactccccccaaaaatgctcgtgaaagcctgaatatcaatgttaggaaataaataaataaataaataggaataaatacaatagtgagcaacactgaaggagagtttgacacctataacccagcgctttcttgcagcgtctgtaagtctttctccctaccctctggcagacaaaagctggatatagctgcttgctcttctgttaagcagtgctttggaaatgcctgtgaacagctcctgcagatagtctccttccttagaatgtagctatgcgagaggttttgtagccattctctttcaggctgtcgaatattgctttggttccattctgccagtgcagtaccaggtccatgggggtcttcccagcctacacagaaaagaggaaatttgagttctaggtgggaggtgcctatgttgatgaggtatgttatcaaagtacatgcttttatgcttttactaggagggagctactgtttgttcaaaccattctgtcatgctggggtttctggttgttttgttattttgtttttgttttgttcatttgttttggggatgtttgttttgttttgttttttggcttctccttctaccaatcacagaactatcccaggtattggaaaaaaaaaaatcctgtccttaggcactaaagtaacaaagatcctcaaatcattgtgaagttaaagcatgtatgtaggtatttctaggaccttgctgaagggctctgaggagcattattcagtgcctcctggtggtaagtacactgccaccaagccatagatatccagccagttgctgccaggctgctgactgctctctaggttcttcacaactactcagaattttcaccaaggcttctcaaaaaaatgtactcatcaaaatgaaattggtgtcagtgacaggtaaataaatattttttcattcccttatgcacgtgtctcaagagatttacacatattaaaacacagcacttcttaattctctttagatgtgagaagtcctaagtgttactctctgtattcagctcagaagtgctcttgattccagaggttgtagactggcagctttgatacgctaatcattcagagacttggttttgctcaggttggggttggaggtgaatcaagagattttctatgtgaatttatgacttttgcaaaagcaaaaatcaggaaagacttctgattccacagtacctcgaggaactggattggagaagagccaccatcaaataacccgcacagaccctagtagccactcactgatgtcatttatgtgatctacatggccctagtgactatatgcatgccattcatttctgcttgtcgtctttcatggcttgtaaaaataagtaggcaaatccttatcttctgtgtctttgaagattgccttgcatgtacttttggctcatttttaaagagagaaactatcgggtgacaccaatcccagttcctagcacagggaaccctactgctcacatttctcaagccaagcaggctccatctgaccactaatcaccattctttcttcttgtcaccaagtcaggctcccactcggggtggctcaagctagccttgagcctgagatcctcttccatgtgctgggatatggggcacactgggcttcctttttaattatcccttcaggctcacagtaacacaagaagaggaggtggtggtcatttgcctcaagaagacctttcctctcttgtaacgattctccaactctcaaggacatttctttggtgatttatcactattcctcctgcagatcttctttaagctatggtagatgatacttgtctggagattgtagccatgagggtacgttgcttacatttccccatgtacacatgtacttatgtaggaattcttgggacctaatgtagggaaattatttcaagacacatgcatataaagtggagaatcagaaaggcatggtggccctggaaaaatggtaacattttaccccgttgtaaaaaaagaaggaatatttggaattccccaaattggatattgattagtttcagtctctgtgtaatttgtagctattttgagaaaggtgggtgtattcattcattcctgctctaggctctcttcagccaggaatgactaaggcagattggaattacccaatgtggttcttatgtttttaagatttgtttatttatgcactttacgtatatgaatgctatgtctgtatgcatgcctgcaagccagaagagggcattggatccattatagttggttgtgaaactttgtggttgctgagaattgaactcaggtcctctggaaaagcagctcatgttcttaaccactgagccatctctccagccccacaatgtatattttaaaggtgacaattttggtcatcctttattcaagaccaatctttcaaagaactattgagatccaaggtcagagccaaagttatagtttccctatgtctgactctgtgacctgagtccttgccaactctcaccctgtccttacggaaatagacacattggaactatcagtgtatctcaaaatgtactaccatgggaataatactttcaaatatctgagaatttgaaagtatcagtggtaccctggctttgactacttacacagttcttggtgttgaggtctgccccgaaggtcattaagagccgaatcatcttatagcgattcagcctcacagcgtcgtgcagtggggtatctccttcctagaagcaggataagcagatgcagtcagtgtgaagccaggaagtgggtcctgctggggtgccccagcttgcctgaatgatttcaaataagcttacggtgactcagccctgtcagctactcactctgtccttggcattgagatccgcctcacaggcgatgagatgctctgcacactcgtagtgaccagtcctcaccgccacgtgcagcgctgtgctgagcagctaaaacattagaaaacgggaaagggtgagaacagactgccgaggcctcaaggcacgtgcaaatggggtgtgtgcggcttgaggtgtccatagaataacgactgacagaggacctccgtgggcaggcagggagcagaagcctaaggaagggcaaggaaataccttgtctcgggcactgattttggcccctttgttcaacaacagtttcaggacatccaggtttcctccacgacatgcccagtggatggctgtggattcaagctgtttgggaaagaaaaaaaaaaaaacaaaacaaaacaaaacaaaaaaaaacacaagacaagacagtgtgaaagagaatcttgctggggctgggggttggtctttggttttaaaggcccagagaatatggacaactgatagttcttggtggttttggtgttgagagccacttctgagtttcttgctaaaaaaaaagcccagctaaactgagtgagtggctggatttgtagttaggaagcttttaatatatctggttacattttagaatatcttaacctggatctaacccctcatcccacctccctgtctttctctgtctttctgctggctctgtgctgtatttgcactcgaacagcctagggacctcagctgtcaatcactgtggttactgcactgtactttgaagagattgccacctctctgctttgtttggtgcatctctggacttccagattccaaatttgggtttgggcatcactttattataataagtttcttaaattttttttcagtattttgtcctttgattaaattcaggttaggttctttggaattttttttattccttttccattttaccataatgccaaattgagctgcatataaataaatgaagcattttccagttcaatcttcagggtataaaatatattgtatagtggtctttatggaaatcacagcggctgattgttagggtctgaagagcagccactttcctgagacctgattcatttagcatgcagcctgactccaaatctcatcagtggcaattggcatccatcatataaagttgcagctaggaaattctcgtgggttgctggcagccgaggggccaggagtgggctgtgctgtctgatgaaggagtgtggtgttgaaaggccaggaatgctactgacttgataatgacccaaactctctggtgaggttactgaattctgcccaacaactttcacttccttctcttctctgcaacactcctctccttttcaggctgtctggaaaatgcttccccatgacctagtctcatcgcccaacttccctttgtatggagaaatgagcttttgactagttttctcagatcaattttcaatccaattgggccagttttcattgtacgttttcctgagcttttttcggatggtctgcttattttggctcatttccaagcaaagaaatatatttaccatatcacggaattcaatctgggctccagcctccattaacttctccacaattgccaagtgtccttctaggcatgctctgtggagagcggtccgtttatactgtcaatgattaaaacaagagatagtggtgcatataaaaatgcgtataatcctttaagagctatgaagctgggactatgatgacctaagtgatagaaaggccaggattgttttatgaatcagagtgccagagctcactgaaattacaggattagaataattatctggcagctacaacctgagcttcctgtcctagacccttcctaagtgttaaaggccaaggcaggcggatgtggacttcaaacctcaaaccccatctcaatgctgaaaggtccctttttgtgtttgaacatgcccaaaacagcagatggttttcttccatccagaatggatgctagattgaatatcaaaaatcattcaattcacttttcaaagagaggaaactcagctttggtgtgagctgccccatcacttcacgggagaagcaatacaaagtcgagattgctgacaagctggctttgtattaatgagccagcaggctaatggaacaagactgtgcttacagataaacagcgacaaagacaatgcacaggagctgttcccatcaggtagtgacagagctggactgggaactccaccttccccttccaatgctgagctatcttggtctgatgaaagacattgctaataataactttctccagaagatactttttggcctggaagtctatccaaaggatctaagaagttaaagacaaactgtcttcaagtcagacagaattatatgagaacagaaaaactccatgcaatccatcatgctaatctagtatttgggggttgtggtgtaggggagaacaatacattcatttttatgctcctggcagatgtagcaacagctggagaaccttttaagtggaagacatctcagactgtgtttgccagcctacaggaaggcatgggccttacctcatcgcagacatcggggctgttcttgtcggacagaaatttctctacaactggcagtttgttctccagcgcagctttcagaaacctcggcacatccacaggttcagtctaaagtgaggaagtaaggatggaggagggagaggaagaggaggggggaagagagaggggagggagagaaaaaggagagggagacagagagggagggagagggagacagagagggagggagagggagacagagagggaacaggaaggtggtaaacaagtggaggaggacgttgaagagaacaaagaagggagagattgaagagaaaggaagaaaagaaaagaatggtcatgggctttgccatcatctcccctccacagcactcacccctgcaacccatgtggatgtacagtcctggaaacccaacagtccttacaataatttcaggttctggttccttcacaactggaactttagtcttcttgtatttttttcttttcttcagttgaacaattatttcaaggtcttccaagttttcaagctttgatctttgttctaattttttctttttgagctagagagaggagaggagaggagagagagagagagagagagagagagagagagagagagagagagagagatatcaggtatttaaaaatatagtgagttttaactggtggtgtataaacaaaacctgtagtgtctaagggaagtgtgtggatggtttgctcataaaggaaatttaaaacacttttaagtaaatgtctcacttcagtgatttttttcattaaattatctggggtcaaattttaatctaagtcttatttactttctttgcttgtagaactaactcttgactaattagatggaggcacaatggagtctctcagtgatcattttgtaattagtaccataagctccagatttctatagaatttgttttctcactctcaaaaactaaagtatgtttacccaggaaagaaaatacatattaaattctcaaatatcaatgcattctctcttaagtggcccccactactcagaaacagaggccactgccaactagtgcacttgttattatgttagtaagctataaacgtcaataaaacttcaacaaaagtaaatgtcaataaatatagcaaacttgttctgactatgaaccatgataactaatgttatcaaaaagaggaaatctcacctcgacattaagtaaacattgtgtcctattggggtttccctagttatgattatctttctgtcttttgatcaaaacatgaccacagcagataatatcattggtttagaatccagaggtcatggtctcatctcagaatcatttcccaaatcatttccatgtgtactgactcttcacatctttgtgggttcaaatttggtgaagagacaactttagaatggtttgtttattttccctctctttcctgtcttattcaagagatctccacaccccagcctcccactagcagactactctatggaaggcctttacctctgcctctcgctgtttctcacttttccattgttgctcctctgggttcacatggtggactggaagagtcttcaaatcctcttgtttctccaaagcaatggcagcttcatattctccatctctgaaatccccagaaaggaattcccctgcggccccactgctattcttcttccctgttacctacatgtgaggaggatggtgacatcagaaccagtgctgctcatcctaggctcactctccacaaaagatgctgcaggatgcccacagtcttcctccctgatgaccatcacattcaggcagtgcactgtcagaggcataactacagatctcccaggatgaccttcgggtgctgtcttgctctctcaagagtaagacaacatgtgtatcaggttgacacacataaatttacttttagccacacagcccactttctcttaggaaattcaccaactaaattcacttacttttcatttcagccttgaggcgtaaagtgctcagacaattatttttgcagtaaaatttgtaccccaagtcatgataactacattattgcatatcacagcaatgaaacccgaggagaagacaacaaacaagaaatatgcagaaaatgcattgctgtcagctgtttccacttgtttcatcacataaacaaaccacatcccatacttgacatttgcagacttcccttacattatgcctgaaaaagaaagggcatctgaactttcaaataaaagccaagatgaagcaggcattgacaggtaagaagatgtcttacataccagctcctctactctcagcaccatcatgttggcagcagtgagtctgtatgttttgctctctcgtggatgaacccctggagttggccctgccgagtccctccacaccagctggttatatagttagggctgggtgagataatcttccaacctgggaagtcaagtatcacccctgcccccaccgatggccaactcagaggcaggtgaattttcattccagactcagtgtctgggaagctcaagagggaggagatgacaagctggccacagtgtgtgcgaatcaggaagaaatgtgagagggccattcctttggcagtgagcgcacagctcagcaatgcgagtcatcctacttatcgggaagccagggacagctgtctgttaatattgcaccacaccgctgctccttttccttctttgccagctttcatatgactagcctatcaagaaaatgcaagcagtgtgcatcacactcacagaaatacggtatctttctgataagtgggcttatcagcactccagtgttgcttcaggacatcctattcctgtggataaataccccggggggagaaggagctgggtcttggtggcacttgtctatatctgtttggaattctctggagtgatgtctcgggctaaaatggccccatgacatgtcaccttaccatcattataagaaattgaaagcattcggtaatgcacttttatttcatggtgtcaccggccataattagcacatggcatgcttactgcgttgtaaaactgaaggctaatcaagagtgtttccctcaaaatggttcagtgtggtccagagacaggtattagcagaaacgtgaccttgacgctgtcactgatataaagttttcaaatgttgtggggaaagcttgggtgaggctgagaaaaatgcagatttgaagctggagatttgcgggctgacgatagagcaggctatcgtgttccgtccctcaccctgaagcaagaaagccttggacaagccttgctcctgagaaaggcaaaaatggttgtttctggcttttcgttgctgaggtgctgaattatgaaaaacataaatattgaagtcattttattattcaagggaaagattccatcttcaaagccacttgcaatacattttttgatgaaaagaaagaagaatgaaagggggtgttagttttggagggaagtgttaattagtgtgttatgtttgctatgttgaccttttatgtctgtccctcctcaaattcgccattcagcaaacatggttgctattctcaccccccagctgaaaatgttcattcaataaattatgtttctagaaccttcagaatgagacattgtcctgaaaaccaacacgctgactaataccttgtattccatgggttcacctttcctaatgttctgtcctgagagaggctgtcaaaggatagtcatagctctcttctttttcacagttaacaccatcttctttgggagcttgaagtgagaagcagctatattgcttttttcgttcctgtagccttatattccaggtctggctcagaactaaggggagcatgagagctttcctttgaggaaggcttctgggctgttgagctgtcttgaatcccagagctctttgtaccttccaagctgaagcaaagccaaggatctggttttacagagaaaacactggagcacagagacactaggcaacttgctagtgtttaatggacagctagatggtgaggctctcatagttccacccatgagaagcaaaaaaatcttgagaccaggtcaagtttcctgactcagttcctactcagatttactcagagcccaaacaaacctgactgaaggctttctgtgaggacatgacttcgaagaacgcaaaatagggaggaaggcttacccaaactattcctctctccactcaggtggtttccctctagactcaggctaatcctgaatgtgaagctccgggaaatcccaatgaacactttgtagaggtcgggcttaaaggggcgatggcatgagctacatatcacaaaggcaacgaactaggaagtattcctggctggcaaaaccactctcgggcagactttttcccagtgggttaggtttgtcattattaagatgaaagagtcctcttttgtctgtttattctggtttggtttgggggttttcatgtgatgggcatgaaggcatagcctcaggcatgtctatgcaggtgctgtaccactgagctgtacttaatcctaagtgtgggtttttttgagccccaacaacagataaggaaaaattttattttaaatcatttgtattcatcaaaatcgagggcaaaacttcgcaactggaagagaaagctcccatcgcttgattttaagactcttccttcctatgaaagttcacatggcagataaactcagaggtttgtgtttgggttatcacagcctctgggcataacctttctttgccaagatggattaaagcagcaaatctcttagttgaatctccagccgtttagcaatgcaatagcaggcatctttgatgagcaccagcaagagaatgaccccagagctcagctggtgggactgtgcaagctttgctgtcttcttgggatttatgtgttgatggatgaaatgacagatgatgagagtcataatcctctgtagagcaagagaatatgtgaggcagagaagtattcactactggtacccagcatctgaaagtgtacacagaccccacctaggttcaggtgctacagttcaactaaaaggataattttgtttttctgtatgaatatgaaatattgcaatttcacacatctggctctatttttaattacatgggtagcatgtacatcattttttaaagatcaataacatgggaaatattgctctcttgagctcttactgggtgttgatttgacgtaccacttttccacttactaataggccttagagatcattctctaccaagcacaaacaaatctacctcattattttaaggagctggatgatttttgcacttgaaatgcatgtcttatttgacttctctcttatttatgagcagggcatttttcacaatggttgcatttatttgctataactgaaggcattttataaagcacatcaaattttattgttattagcattccttgaccttataaaacctaactcaacactaaaagaagagccccaaggactgtggccagattctgacttggaagacatcttgttccactgttgcacttatacgagtgtctttgccaacccctgaatagcctcctggtcccagctcttgctcaccttccttggctcagacaaatgcccgaaatccaagtgtccttacagccaaggatgactcattggaaaatgccaaagggaagtcaggaaagcaagcaaactagccttaaggttgtttcccctcacctgccaatcatgaatggagccgtctatatatgaacaacataaaagtatgctaggaacatttgagcagtgttctggcattcactgtcaagaaacgaacatgaaaactgaaatgcttctactctgggctctgaatatgactatcttgagtggacagagagttcctgttcagaatactagaggcctcctgacactagataggtaaaggctggaggtctaatcccagagaccttgatacagtctacaaaagaaatcccagacaagcccccaaaatgatacagtctagaaatgatgatacagtctagggttcttgactgggttcgtcttttctctgccagttaaagaattaaaagtcaagaaatcttgaagcacaaaggcagtgttcgagaattcttatcacagacaaaattatcagtaaaggcatttattggaggtgagcaaacaactaatttagagttcatcatcttgaagacaggtagaatgtttggtctaccactgttgtgtaacttatcctgatccagccttgaacttgttaagccaatccatcagcagggagcctgttggcctgagacaaaagttgtcagacttttgtctcaagtcaggaggttgagaaagatgctggccaccttggaaattctctctgtttcttacctaaccatggaccctctacctatctgtctaccctccatggagtctgtctggctcctggtctctcaacctgacagtaggcaatgtgtcagagtgaatagagcacctttctgtcaattctgttcacattaattcatctcaggcaatgggcacagctacacagacactagagtcaaggaagtctagtcaagggacaatgtccctcttgaaaagttacttgaggcaaaggaagataattccatcctagcaattgacttcagctaacttccaagatttgcctgagagcctgagacttcaaaggtatagacaaatgctacacaagccactgggctaaataaatatttagctgaactccagtgagattcttagattcatttccagctcaaccacatagcttgaattctacttttagtgtgaaataaatttcaccatttttcatggtaattgacagctaacaccctagtagtaaagaaagttgagggtaaaggcttatggctgagaactctgaagggtagcacttcattacaaccctccaaatgctaacaaaccctaaagagggcttcctcccagttagagacccagagatgcaaattagcatttcccacactggtagttctgaggactgaagactttcacatcttagagagccatgaagcttaaaaaacaaatgaaaacttaacgcctatgattccagacacacaaataaatctctgcacttcagaacaaatattggtgtttaagaaaactttctggtggtacattcctttaatcccagcactcaggaagcagaggcaggcagatcgatgtgagttcaaggtcagcctggtctacagtgtcagtgccagaacaggctccaaagccacagagaaaaaccctgtcttgaacacccccacccaccccccaaaacaaaagaaagaaagaaaaggaaagaaaacctgcctggttctattttctaatttccattcaattttgagaacatcactccagaataaagatttacatgtggatattccttttaagttgtactagactgtccagctgtactgaccttgatctaagaatttgattattaacaactgtcatgatgaagaccatgggaaacaaacaaattaataaaatgagtttattccaggcttaggatatagcttggtggtagagttctcacatgtccagtccatcatggcccagtctctaggtctggttcccagcactgggacaagggggaggaaaagaaggaatgaaggaaggaaggaaggaaggaaagaaggaaggaaaagagggagggagggaaaaataaaaggacaattactcatctaatatttatttggccctactgtgttcagatactttactcctcacaagaaacagactcctctctccttgtggggtttatagttttgctgaattatttaagggaaatctcactgtaacatgtttcatctgccccaagtcaaggagagtgaatgaatgcagaagttatggtgtgtgtgtgtgtgtgtgtgtgtgtgtgtgtgtgtgtgtgtgtgtgtctgtgtctgtgtctgtgtctgtgtctgtgtctgtgtctgtctgtctgtctgtctgtctgattagacaaggaaccttgtttctccatgttggctttacactcttcatctccatgtctgatgtcaaacagcccttcagatctccaactcttttcagcttttttgactacacacacttttctcacttgtactgttctactcccttttagcagctttcctcagcaggtatcccatggctctggcatctccaacaatgggtcttggaggcactccaggcttcagcttcatagcttcatgcaatgaccaggttaggcctccatgcagtgactcctttgacacatgtgtgacctcggtggcattccttggttgcagaaggagattccataatccctttcttgtatcgttgattctaaagccagaaccatgaggctgaagctgacaagttctactgctttctggggctaaaatatagcccctcattcaattacatcttcaccagctttattttcaatggtttgcttcactctctaagcttggctgttctagaactttctctgtagaccaggctggccttgaactcttaaatctgcctgcctcagcctcctgagttctggaactaaaagcatgtaccagccctaaacttttctttacatccttttcacaagctggatatttagctgggtaggatcttgcctcaagatcactgttagcataatgttcgagggggtccttggtgggagacaatggcaggtgagggtgaccaaggcagagggacaaacatgccaggcaaacagagtttaagtgagaagttttattacaagggggaaggaaagagaaaagagataaagagatacagagacagagagaagacagaagacagagacaggaaaagtcctgtctgccccagggaaacaataggaaggagagagcagggagaacaggaagagagcagaaagagaagagagtggagagagagaagagcctgaaagagagcaaaaagagcataagtgggtggaggtccttcttttaaaggggccctttgcacctttgtgcacacaagtactcatggaaccctgggctgaccagagtactgcctgagtgcattctgccaagtgacagggccaggctagaataatgcctgaatccttatattcccacctttatttattattaaaaggtgaggagttaggtgtggcaggttagggaataaggatgtctttagagttctcaagactacttgctgctgacctgggggcatcggccatctttgggggacctgagaaagctggggtgctgccatgtcctggtgtagctgggtgtttcatcacagttcaggctctatggaactctatggcacctcttaannnnnnnnnnnnnnnnnnnnnnnnnnnnnnnnnnnnnnnnnnnnnnnnnnnnnnnnnnnnnnnnnnnnnnnnnnnnnnnnnnnnnnnnnnnnnnnnnnnntattattaaaaggtgaggagttaggtgtggcaggttagggaataaggatgtctttagagttctcaagactacttgctgctgacctgggggcatcggccatctttgggggacctgagaaagctggggtgctgccatgtcctggtgtagctgggtgtttcatcacagttcaggctctatggaactctatggcacctcttaagacctggcaagatgttggcagagcaggggacaaggttaagtttaggaaaatttttttctaggtcctggtacttgaggatcataagatgagggagggttcccaagggggttccaagatgaaggaagggagtcccaggaccagagaaaggttgaataatatttatctggggtgaatctgacctgtttgggtgggttcaattcagctccctggaacttgcaagactcctttgagtttatgaaaacataaattttagacatattagcagtatactcatgtcagaaatgatttggttgaaaccattaatgttcttaaaactgacagatatctttagcccaatgaaaagcgccttaattttgagcttgcagttatgattgtatagtggtatagtatggtgtttagtactctgtcagagttggattcgtagcttatcagaactttgttgactaatgttaagactatgaacagtagcataatgaaagagagaaaaatctggaacatatttcactcatttggatgtctcaaatcccttttttgtcatcacttaagccgtttatcctcaaaccttcataacttgaattcatacaccttatgttaccattttagacctttctgttctcagaccttcataactggcatttatcctcagaccttcatgcaccttacactttcctatcttcacctggataaaccctaaaatacctgttcctgaaatctgttttgtgacagttggagccttggctgctgtttacaactggaaaagctacagttgtccaaagcatcagagttcttgagaaggataaaattttacctgagttaatgatgagagaagaaggtcttactagttgactgcatggacagcaccagaggtacctgtggtgctgaccatgcccatttgggcatggtcgcaggtgcgtacatgagtgtgtgagatttgctctggggtcctggacagacttgctctctcttggttctggtcaggtcatagagggcagctgggtgttgattcatggagttggaatttgtgggttatcggtttctcatgtatgtgatttctccccgaataaaattaacctatattatcctagtcccatgtatcttaatctgtacatccacagaaagtcacacccccagttccccacagttgttgaggtcagaggtttttaggacacctgccttctgcttacagcatggaacctgtggattaggagctttaggaagacttgccttccaatggcccgagcaacatgcagaaagttggttccactgtcctcttgtccaccatctgaagagtcctttgcagcagttgaggtgaaaggcaggattgctcagtgccatttatgaagcaagttccgggttgagtttcttcagtgtccagtcttcttggaggaaatgccaacattatgctaacatcggtgcatgtgattgggcaggtttttcctggcatttgttcctgcccatggtagtctgagatatgccgggaccctgtaaccttcaactaggtcacttttccagctaaggatccctggattcttccaaccaccaccgccatgtctagtaagccggcttctcattctctacttctgtccatgcttccatgagttaggattcgtatcaagactgtggtctctcacctttttggccctgtgaaaatcccagtactgggtgaccatgtgtctctcgggctccgggggagccctggcacctgatttgtgctcaaccaaccacaaaatcagccggtgccaattgtatctgatcctcccttagtctctgggatgctggagattataggctttggatcccctctacctctctcatggaagctgagccccacatatcaaaccaggtacatgcttgttggcaccctcccttctccagtgatcctagttggaggtgtggcctctgctcttcttcacttgtctgttttcctcctccacccagcatgctaaaactcttcctgccacagcagcatcctgccacttcccatcatggctaagcctttctcagagcagaatcctccttccacctgggaatgtcctgtttcactaaatcttttgcttctgggtcaaatgtctctctctctctcctgttcgaactctgacaagccattcagcctgggatggcgagttcctcttttccatccatctgggctacttccctgtttcttctccgtgcagatgccagtgactgacagtgggttggcccgagacagcatctgctcagaatgctctgagagttttgtatttttcattgtttccccacgaatgagattttggggttttgtaccttagcacagtcaataccgacaggtgcattcatttctcagacctacagcggtctttttggatgttgtgccccttggactccaatatcctattggtttcacacatctttctgtctcacttgtggagaaaaaaagccaacaaaattattcacaaaactttctaacctctgctggacaggaatgtgtttggccctgccatcttgaccatgtggcctagctataggcctgcccactcccttccctcagtctaggcggagggacagtctagctagcttctgccaacaaaccctgctgtcagacatagttcatttacttttttgccttttattttttgtctctaatttcttctttcactggctcagttgcgcatggcttgtttgtgtaatggtgtgcctttccagggcctggtagggcacacatttcatggaaaacaaaatgaacaaaaacaaaaacaaaaccttgcctgttgcatctgcagtggatctggtagtttcaagtctactctgtatctttaaatgtcttgtatgttcactacaacgtgcaaatcagagattacactctggttctcccattcttcttacttttacccagtcttgtttaatatatctttgtgtctctgtacagatgatttaaatataactttatgtacgtgaatgtaagctaactctatatgcaacttaaatttaactgtgctaaatttcaaatatttctaaattgctatgtatctttaagtgacggtaaacatttaaggctataaaggtctatttcaaattaacaaaatatttacaccaaccagtccatcctgtaagctttttgcaacagttaagcttctattaagggagatttttctctactactttgtcctttacaggcacaaatctagcctactaagttaaaaccagttacagttaggctggagggctctgagtaaaacatccctccacagcctctccgcttgaatccagttctccagacaaaccctaccctaatgtcattgtagccatactaagtacagattaattaattacagtgataaagccacctgagtgcttaaggcaagtaactaaagacgaattttgtctgctgagatatactaaacagatgaacagccctcaaatgctcagagatatagagaatatggcatttaaaatgttttcttgaatagcttttcataacagagagacaggccatttgctggcaccaccctgtttcctccaagaagactggacactgaagaaactccacccacaaaggttgtaatgctagccactgcctttcacatcaactgctgcaaaggactctttggaccatggacaagagaacagtggaattgactttctccatgtagcttgggccaagctcctactccacaggtcccatgctatcagcagaaggtgggcatccttaaagcttctgacctcaacaactatggagggggctgtccatgtggccagctaggaagtctctgttctctaatcattaatgcaggtaaaatttcatccttctcaagaactctgatgtagtttgatggctggtaggtttcagtgtagctcttgtcattcctttgtttaaacaaacgttttaaggtataacaaagtaacttaaggtatacaaatgcaagttatcagatttctttctttctcattatgctactgttcatagtttaacattagtcaacaaagttctgataagctacgaatccaactctgacagagtactaaacaccatactataccactatacaatcataactgcaagctcaaaattaaggtgcttttcattgggctaaagatatctgtcagttttaagaacattaatggtttcaaccaaatcatttctgacatgagtatactgctaatatgtctaaaatttatgttttcataaactcaaaggagtcttgcaagttccagggagctgaattgaacccacccaaacaggtcagatttatcccagataaatattatttaacctttctctggtcctgggaatcccttccctcatcttaggaacccctggggaacctcttcctcctcttatgatcctcctcctcccaagtactaggacctaagaaaaattatttttcctaaacttaaccttgtcctctgctctgccaacatcttgccaggtcttaagaggtgccatagagttccatagagcctgaactgtgatgaaacacccagctacaccaggacatggcagcaccccagctttctcaggtcccccaaagatggccgatgcccccaggtcagcagcaagtagtcttgagaactctaaagacatccttattccctaacctgccacacctaactcctcaccttttaataatannnnnnnnnnnnnnnnnnnnnnnnnnnnnnnnnnnnnnnnnnnnnnnnnnnnnnnnnnnnnnnnnnnnnnnnnnnnnnnnnnnnnnnnnnnnnnnnnnnnttaagaggtgccatagagttccatagagcctgaactgtgatgaaacacccagctacaccaggacatggcagcaccccagctttctcaggtcccccaaagatggccgatgcccccaggtcagcagcaagtagtcttgagaactctaaagacatccttattccctaacctgccacacctaactcctcaccttttaataatacataaaggtgggaatataaggattcaggcattatgctagcctggccctgtcacctggcagaatgcactcaggcagtactctggtcagcccagggttccatgagtacttgtgtgcacaaaggtgcaaagggcccctttaaaagaaggacctccacccacttatgctctttttgctctctttcaggctcttctctctctccactctcttctctttctgctctcttcctgttctccctgctctctccttcctattgtttccctggggcagacaggacttttcctgtctctgtcttctgtcttctctctgtctctgtgtctctttatctcctttctctttccttcctcctccctcccccttgtaataaaactctcacttaaactctgtttgcctggcatgtttgtccctctgccttggtcaccctctcctgccatgcccccccccactctaatgtctcattacaactttatgctaaatcaccattccctttaccacatttaataccaggcttttctttaatctgcttatctctttgaacacaggactttgccctagtctacttcctggtgcctcttcctcaagatgtacattttatgttttttcttgttcagcttgctccatttttaggtctgcataagagtgaacattaatagccacatgacagagtcaatactaaactattttgtgatttttttctgccaatgtcattaatccaaaattcttcaatttagacactgacagatgaaggcaaaaattagccatggtcttagccaaaacatcacaagaatgatctctaagccacatacaaatattcttccctcagaaaccttttgagccagcccctcacagttcaaatgaccctcagcaccactgccttccatgttcctactaggatggtccattaagccccactgaaagcactcaactgcttttctaatctgaaagtcccaaagtccgtatcctccaaacaaaagcatggtcaggcttttcacagcaataccccactcctggtaccaacttctgtcttagttgggttttattgctgtgaggagacacaatgccatagcaactcttacaaaggaaaacatgtaattgggctggcttacagttcataggtttagtccattaccatcatggtgggaaaagtggtggcgcacaggcagtcacggtgctggagagtcagctgagagctctacatgaggacctgtaggcatcaggaagagactgccacattgaatatggattggacatctgagaccccaaagcccacccccagtgaccacttcctcggcaaggccacacctcctccaacaaggccatatgtcctaatagtaccactccctctaggcctatgggcctatcggagccatttttattcaaaccaccatagggtctaaaatttaagtgaaactttggaaatcacagaatcaaaaaagtagaaataaatacccataattgcaacacaatgtatagactgcaacactgattctccaaaacttcaaaaaagaaacatggttataaggctttcaccagcccagtgaacagcatagccatacccctccaatctgaggtttttttaaaatgccatattttctattgacatccattaaaatatcaacatcaagatgtggtagactttggggagcccccttttgagggccttatcctgtctggggagtggagagggaatggctaggggcaggtgggatgttggggaagaggggagggagagagagaagggattgacatctgaagcaagcttgttcctaatttgaactaataaaataaaaaaaaaatcaacatcaagctggggcccaaaccaaaccaaccatagtgtttactttgaatacgtttgtcttttcaggtttacaaagtacccccaaagactggagaaagaggagaagaaagagaggaacaggaaaagggaaagaagagaagggggaggagaagggggaaaaggagaagtctcactgtgaggcccatgctgaccttgaactcatgctctccctgcctttttctcttgagtgctgggattactgctataccaccacactgcaaattagatattttgatcaaccctctgctttatcgtctctgctctgcctcaccaaagctctttcctttgtggtaagggtcagaagggttgcctgtgtctttctattaaaattcatattttctccaaacaataggttattgtttaggtttcttcactaatttccatagttttagaaaccaaaagtcataagaatcatcattctcagtctgtgatcaggttgactttactatctattgcaacttcaagaagaatcagttaaaatatgattgcataattattcccccctctactttttgaaaggccaaatttattgtggatggtggagaattggtaatgaagcaagggcggttttttctttttagattatatttttcaaaagaagtccaattgtcatagcaacgctctgaaaagattctgatgcaactttggaattatttcacacacccaattacataggatgtctgcttgggatgagagataaatgcttctgtgactgcaaacataggaagaaaatccatcttcacatttttagccatttattaaagcaggggaaaatcgttttcaaaatgcaatttctgacttcaagaaagattattgcaaaaaaagaaaaaaaggtgtctcggtgcagtttggaggttcctaataaaacagagactgccacaagtcatcttcactataaatctcctgcattgtctatccccaggccctttgaaatcctcaggggcaggcaggtagacaccaaggactaagacctctggcacatcagagctgtgttgtgacaaaagtttcttgtggcttacctaaatcttggcagttagtctgtttgtctcaacctaatcccaggaaacaatatcaccaccaacaacaatttattgagtgttttctgttgttcaaaggtagaggggaaaaaatgaagttcctgtggtgatatcttgtttgtacaaataaagcatgtctgaagatcagaaggtggagcttgccactagctaaccatagaggtctggaggtctgtatagacagtcaggaagtgagatggttgggtgtagaaaagaatataagtaggagaaagtaggaaattgctctcttttctgctggaaagctagtgaggtaaaggtggctttggcttgctccttctctctgatctctcagcatttcccctatgtctgaccccaggcttttatgattaagacttattagaactcatgttacaagtccctgccatgggatatgtgtgagctactactctccctctatggttgctcctattgagttttagttttttggaaggtaaaaaaggctttgatattgttccatccagtcccctaatttcaccttttgaaacatgtggctcctgaagaggtcatacagagacagattatcaattcagtgtgtgtttatttaacctatgcttgtcacatttcccaaaattacaaatttctgaaagtatggcaacaagaagcataagctattacttgtgtaaaatccttgcaaaaatgtctaacccgaatctgacagtaaggcaacatgcagacaaatgctgactgcagtacactccatgagacagatagacaacttgggttcttcacaaggctttgtgataggaaatgttcaagagagattgtcctggactgaaaggaaccagcctcagctagatcctgtcacttaaacacaaatgccataaaaatgtgttcttaggacaatgagagctatgggtgtcgttatagatagtatggttgaactaaagagagcccttctttttgttttattttctttatttttttttgttgttgttcttgaagacaaggtttctatgtgtgtccttggctatcctgggaacgtcctctgtagagcaggctggtcttgaactcaaagatccacctgtctctcccttcagagttctggacttaaaggtgtatcatcactgcaagagaaagagaatcatcttattcttccaagatgcattctgagcacttaggaatgaggtacatgctctacacgtccagaaaacaagagaagtgggggaaaagtacacatgaacatggcaccaaagacaaatataatcacgaacagtcaatgaatgggaaagatggtgcaggtgcttttccttcatctttctacatgtttcaaaaaatttttaaaatttagtaagacgggaaccctcaggctaaagtcccctgaagcaagagtataagtttctctatacactgagctcttacagcagtcctggcacctactaggcactgagtgtttaaactacagagaagaaggtccctggatagatctttggaagggacaaaccaaggagcagccagtctgctcttcaggtgatttctcagaggctccatggagccagagcaatgcccagaactgggttcctctgagcattgtgctctccatgtgaggtcagctgagcagattagagaaaagacccataagaccagaagagcttcaccatgacctgtttccttgtcactcaacagggctggaaatggtgtggggactattctgatgactgaacaaagacagcacacactgactcagacagccactctatattcaggagaaaatctgactgttagccctcaggggccatggcatgcttcatccccagtgcagaggtagataaattctttctacatttcatcccaccagaatgacttggtgggtggtttttgggggtgtttttttatttcctttcagtttttccagacagagtttttctgtagctttggagcctgtcctagaactcactctatagaccaggctgaccttgaactcacagagatctcctgcctctgcctccagagtgctgggattaaaggcataagccactaccgactggtgataccttttgatacttttttttttgagtcttccaagctcctacgaggtgataacttaccaggccacttccaaattgggttaaagaaaaataaatattttaaagatttatgtatgagtccactgttttatgtgaatttgggtgtgcctgcatcagtttgtgtgaaccatgtgtggtggtgtctgaggagtccagaagagggcattagataccctgaaactggagttataggtggttgtgagccaccatgtaaatgctggactctgaacccaggtcctctgagaggtcagtaagcactctgaaccacagaaccacctctccagcctaaagaaatatatattaagaaattgccaaactgtaaataaaatgcccagaaaggagggtaatggggggggacccaggggagggaggagctacacaaacaacctcttgcctatttcatttctcttgaccaccccttttatcagacagactctggttatgcagaccatggtggccttgagctcacagagatcaacctgcctctgccttccaagtgatggaattcattatctggtgccccacctcgaatcctccagcttggcacttggagggcacatgaggctttccagcctcctgggaagtggaaaaacactattagtcctctaatagtgactgggttcagatccttttaacagacctgaccccctgccaccccaggcttgtcctttttcctccgtagattgcaagtatgatctgcaaggtgatcctgtctctcccattgcaggagcctgcctgagctttctaaactgaatccaagaaaggcaagtttgcaaacacagactctcctggtgccagcagctgatcttcagggaagagggagcccaaagttattatgagatccgtggtccgtaaggttaagatatctttattcagataaaccccgcatgtctcagccccaagccacaaagccccttggggatttctgctctcctatagagacaagggtcttgggtttcacaaaggaattcacagagccactgatgcctcagggatccgatctgcggggaactaagtggaggagcagcgaggagagccaggcaccctctcagctctgtcaggacctgggttgtttatcagggatgaaaaaatgtcctctcactgaaaaggaatgcttggcaaggaaacggcccctggaaatctaccaaatggtgcctggggagccagtttaggttggcaacagatcaaaatcaccaacttgggtcagtcatactgggtggggcaggttcaccagagctttgggaaaggacagctgtcctcttttctaggtagatgacgtatgtcaacagaaggaggaggtaagagaggaaaggggagacgttatatgaaaaagcaaaggagtgtttgtttgtttccttgctgtgcctctcagctcagcgcagcacctaggtctcttcccaccatgtttggggatgctgccatgaatgaggcaagtagctctgctcactggcatgcacacagataaggggagaaaaatgatgtccttccttatttggtggccctcagagtcaccatgcttctgcctctccaggcagaagcctgcagactgcttagcacttccttatctaggaattccaaggcccaccacaggcctccggatgtgcttcaaccaacggcctgccacttgcctcctctcatgatgacaagcagattacatagctcacataccttctgcataccaaccagaccccagctctgaaaaggaagcagctacaaagtgaaggagatgcatgttattattgtatatatatattatagacatggctcagacccttctctgagcctagatccatgggagaaatgctttcctgctccaggtgagctagctcttcaatcattagcaggcacagaggctaattaaatactcaaacccacacagcaagtgaatgtggagggaggggctatgattcaaaatcaagctgactcctacctagtgcaaatggcagtcactaatcagaaagctttgtcacgaagtctgcctttgtggacttgaagacaggttcctttcagatattgtttctaatggtgcacttgggctggctgtcggcatcaccatggttacaaccaaaactcatctgcagtctccaaagatcctgtttcccagagtaagagagtgaggaaaatatttgttgaatatagaagtaaatacatgagtgtaatatatttattgaatatgccagtaaatacatgagtgtaatatatgaacaaagggggctggtgagatgggcccagcacatagaggactagttgcctactgacctgggtttgatacatgaaaactacccaaaggtaaagaagagaatcaactgcccaaacctgccctctgacctccacacgagtgccacagcacatggccacaccacacacacacacacacacacacacacacacaccactaataataaaaatttaaatatctgaattaaagtggaaggaatataaggcagatccattcataatctctaaacatgaatgagttaaataagccccttaagtgacagctaatcttaggaactagcaattctacctctggctagcacctaagatgattaaaaacaagaacttgcaaagatgtctgcttttctaatatttattattaaaatatttattttatatctgcatgggtgttttgccggcatgtatatatgtgcttcacatttgtgcctggtgccaaaagggacaaaagaaggtatcaaatgccctaggattggagttacagactgctatgagtcacttgtgggtgtgggaatcccaccttggtcctccacaagagcagccattgttcttaactgatgagccaactcgccagccccttgaacagatatttatacactcatgtttatagcagcctaggttaacacggggatgcataccaagtgttcatcaagagataaacagaaaatcattgcatagtgcttacatataatcaaataccattgggccttgggaaggaaggctgttccggcttatgatacaatatggatggaacttgacaacatcatgctgagtgaggtacgttccagagacactttattatctcacttaccatcagcacttagattaaagcaaaaccaaaaagtcggaaagtaaagtgtcttcaaaggctggggaaaagagaagtagggagttggaacatgaaggtaggttttaccatgtgtcaggagttatggagctgagtggtggtgacagttgcatattatgactttaaagtactaaactgtacacttacacaaggttaaaaaaaacctaatttatgtatatcttactacaaaaaatcaagacaaaaaaaggaatgaaaataattatcttaagaacatcaaagagataattatttactgtaaaagaatgaaaacccaagtatatgctgtgtatgagagatacgcttatgccagaatgacactgaggccaggcttggtggtggctatgcctgtgatcccagcattcaggaagctgagacaggaggccatgacgcttgaggcaagcctgggctacagagtgagactcttgtcaaaagaaaaaagaaaaaagaaaaggctggaagaagctagcatgtaaatgctactaaaatacatagaaaagacaataatagtaccaagaagaataaaatacaaagcaaaaagcaatacattagaacaaggagagaagacacaacactgaaaaatgtgagagtagtagcacttttttgcacaacaaacaatatggcatcaaaatatctgccaaatccatgtagccaggcatactaagaatgaataaatatagtaaaaagtactgctttagctggataggaacttgctgtcttcccctggaaaaatctgtctgtggtttatttaaagcagggagctcaggccagatttccagattggaaagttctagggtatcatggggaggagttatttatgctgtatgagtattttacatcggggcagtattataacaaatagatcatggaagtcatacatcatcataaggaaagagacaaaaccccagtagtttcttggagtgtccttttggaaactccccaacactcaaggttcttaccagggcacgtgtgtgtgtgtgtgtgtgtgtgtgtgtgtgtgtgtgtgtgtgtgtgtgtgtgttagtggaggtggtgttataccatgattttcctctaaaaaactcgttccagcatcagaaaatggcaagtcagtcaaacttgaggggatcatagctagagagtttgagcactgcagggtatgtttccagggaaagaattcatgccagaaaattgaaccctgttctgataaaaaaaaaaagtaagaaataaaagcagaaaaaacaacaacattaaaaaaaaatacaaccaggtaggcactttgagctaaacaaaagtgttggggtaccgcttagaacttctcacatgagagctgaaattcccagtaaaagtgagacaggatctctgtagtttaagaggtgtggatgtaatcaaactcattaatgtctcatgttctttgcacaaactacacaaaccaaatcaccatgtccacactctgtgccaatgggggttcgggtctttttggggctgccattacgttggtttgtgtatgctatttattttattttttgatgtggagtgggttgaggatacccacatattctatattaatgtaccgatgtggacggataatcacatattaggctcaagactcttcctgtctttcttgtccttaagttggtctccccactcccatctgtacccctgagtagggtgttcttgtctctccagtgggactcagcatattactttatctctggctgtccgcccttttttcatctttttccctctcccaccttcctttttttttttttttttttttttttttttttttttttttttttttttttttttttttttttttttttttttttttttttttttttttttttttttttttttttttttttttttttttttttttttttnnnnnnnnnnnnnnnnnnnnnnnnnnnnnnnnnnnnnnnnnnnnnnnnnnnnnnnnnnnnnnnnnnnnnnnnnnnnnnnnnnnnnnnnnnnnnnnnnnnnaggcccaaatatggtcagaggtttcagtcagggctgagatcaccatagatgagcaatgcttgcattctgcccaaaactaaggaaaccacggggtgtcagcgacgacggtccactgaaatccagacacctcgggtcagggaggaaagggatgcagccagagccctgtttataaaagcagcaaaggcttctgctggctgtggcctcttggtgtaatacagtcaattttccattccacatcaatttgcattcctacctctgttatgattattttgctaagcataagccatcttccctagctccccttagattattagagcaggtacaacaatgaaactattgaaagatttttttctgacacactctctttttgaaagaatgtccaaagaaattggctaccttagaggttctaaaatgtcaaaaatttctattatttcctgccgtggctatagcccaaaaccttctagaacactgagatttctttttttatcatttcttttttaaaaaattatttcgcataccaaccacagtttcccctctcccctctactcctgttccccccccaccgcctccattttatccccccattccactactcctctgtctctattcagaaagggtaaggcttcccatgggagtcaacaaagcatggcatatcaaaagttgaggcaggaccaagctcctccctctgcatgaaggatgggtgaggcatccaccgtagggaataagttcgaaagagccagctcatgagtcagggacatgtcctggtcctgggtgtctgccacaaaagaccaagctacacaactgtcagccagatgaagagagcctaggtcgctcccagactggcgtcctagctgtctgtccagagtcggtgaagtcccacaagctcagatcaactgtctctgtggatcatgaccttgatccccctcctttgctcatatgatccctccttcttctcttcaactggactcccagaactctgcccagtgcttggctgtggatctttgcatctgcttccatcagttactggatgaatgctctctggtgacaattagggtagtcacctactggtctgattacaggggaaggccagttctggcaccctctccactattgacaggagttatagctggggtcatccttgagggtgggttcctgggagtttccctgacaccaggtttctccctaaccccacaatggctctctctatcaagatatctctttcattactctccccttccaaactgccgacaacccaccatcctgatcccccatgagcccatccctcacgccccccctttctgcctgccctcagtttacccagaatatctcctctttttcctcttcccaggaagatctatgtgtccctcttagggtcctccttacctagcttctctgggcactgagatttcttatttcttggagtaaaggataagggataattttatttgcctgagacctaacccatatgagaaacatgtttcccactatgtggtgatatttgactaaaagactgcctgcaaaatttctaagggacccatggggagatcacctttttattaaagtactttgattaactaagcactcagaatgcagactgttagaatgtacagaaagtcttctgaactgagccaacttcagccacagtggacagcggcctgttgttgagggatgtgggagggaggctactgaacactatgttggggctacagcccagctttccttttcattattatcactgtgtgcattgttcatgtatgtgtacatgcgtatgtgggtgtgcttgttctgtgtatgtggaggccagaggctaatattaggtgtttctttattgatcttcatctatgatgatgatgatgacagaggatctcaccttgtatccctggttgacctggaactcactatgctgactaggctgaccttgaactctcagagatctacccatcaagtgctgggactaaaggcataaaccactattccaggctctcactaaccctggagatgatcatttgactggttggtcagtgagcctctgggatgtaccagtctttctgtcccaccctcagtacttggtgctgggttgacaggatcttgttgccatcagatgctttatgtgtgtgctggggatcctaactcaggtccccgtgctggggatctgaactcgggtcctcatgtttgcacagcaggtgccttaaccactgaagtagcttgccaggcccccaggtctggttttctgttttctttttacaatttttctaggggattccaagccagaaaggcaggggtactttccacttcaattcacagctcatggaactgattataaaaggttttgaagtcttcagcaagactctgtgggacaaattctaacctacataacgtaaccttcccagtcccacctgtttaaatctttgctggccacctgccaggcgccacgctttgggatgtctgatcggttcattttaaaaacctcagtgtacccttataacttactgcatactcctctttacagataaagaaactaagtccattgctttaaactgattttctcaaaacctcatagctgggaggaagaaagagatctgggattccagcatcgtgtgctaactttgccatctgcattttcaaatcctgtgcttatggctaagctccccattctgaatacagctggggagaaaactggcaacacacatcatctgtttaccttcctctgaacacctacagtcatctacacagcacacactccatgcaagacttcaccgagaccaccggagcaagaattgttcagacacacccacgcaatcccaaaccatttgcaaagcctgatatctgtgctctcagatggccattgtaagaaggggtcattttcagatcttaacagaaaaggagactaagaggcacagtggttaagtgattactcagtgttacaatgcagccaacatagctgagacttgggtctaagatgggtcttactccctgtgcagtgcccatttggctcctctgctggtcatctgcatcaatggatcatgacagcctggaagcatcacgttgataaagagtcacagaatgtgttaagacttagcaaggaaggtgtagccattggttaagtttgtgaaggaacatcagaattgggaagaacagcagtacacttgtcacaaataggtcatctctgatctattttgtgcaacctcatcttctacagaaagggaaatggaggcccacctcagacatttggaaattttgccacattctctgaagactcaatggcagagccaaacacacacacacacacacacacacacacacacacacacacacacacacacacacacacaccgacaaacaactctctcgccaaaaacaaagcaaggaaacaaacaaacagcaaactcggtagtttgaaaagtccagatcacttgccatagcatttaaaatatgaagctcaggcttgttgtgctcatccaatcacaagtttcacagtctcttatgtgtgaatggagggtaggaataaaactgagctgggtcgttgccagggaagacggagatgaatctcacaatgttccccttccaagcacctatacccttctttcacgttccctctcttttactatcactagtactggctcctgcatccccatccttgtctaattctcccatctttaaagagttttacccgatttttcctacaactatgaactgttcagtgttggatgagagcattgttttgcttgtccacagactcttcttggctttgccctgccatgtatgcatccttactgccttgaattaacttcagccaggagtctagcaagatggtccatctcataaagacacttattatcaagtctgatgacctgcattcactctttgtcactgacatggaagaaggggagtctgacccttcacaaattgtcctctcacctctatccatgctctacggcaagggtgccaacacccccccacacacacacatacacaaacacacacacacacacacaaacattatctggttcacagtgttctagaggctcaagaactgaaatgggtgatggccttctctctggctgagttccagaaccaacagaagatgtcatagaatgacagactctgtgtgtgtgtgtgtgtgtgtgtgtgtgtgtgtgtgtgtgtgtgtgtgtgtgtcttcttagaaatacaacgaaatttagtaatggaagactcacttaggtcttttctaatcctactgatctcccaaaggcttcactttaaataccatagttagattaacttggcatatttctgcaatctctacatgagattacagcccaacacatccaaatcacagcagcaagttaaagcaacatctgagaatctgattctgtggtccaactggatttaattcccaagatgccttttccacagcagaaagtgggctgagtttaggatttgatgatgaggccaagctttgttcctctaattgattataagtactcattaaagttagcattatcatccataaaatggaaataataaatcctgctctgcaaaatggagatgagaatagatatgttttaaaaaaagaaaaacacaaaacagctctaacttgaaattaaagcatacatcattatttttctaggttaaatataaatgatgaggagtcatttgaaaaaggaccaggcccagggcaaggagatggagccatttgcataacccagctccagtgagtgacctatgactggaacttcctggctttacgaaagtcatgcatttttaacacatttcccccctcagctattaaatgaaataacaccagatgtgatcaaatgccactttttgatctctgaatattttggtttctggtggttggtttgcttcaacttatgctttcatgtgtggggggaatgtaaattaaaatcatgaatattattgcctggatctatcttttggaaacgtgtgaatgatgaagggtttcatctgatggagcttgtgagtagcacatgtaaagtctctccaagcaacttgtagagtattttgaattggtcaacggatttgaaccccagtatctgggtctaaacttcaagccagcaatgtggtgaaaccagccatgggttccaagctgcacttcaagctcttaaaaagccatcttcacttctagtaagttcttgggctgccaagactaagaccacacattgcagaagtttctcttctcaaagtctggtgactggaagtctgaaaccgagatgtaagcagggttgtttccatctgagaacaccaagaaagcagattctttccatggctttctgtctattgtaaactgaactaggtctctatgaaaatgttactttgaaatcctaacctctcgtgctttggaatgtgaactgatttggagataagttagttacagggttaagttatagtgaaatcatcagagaggactctaaatcagtatgaattacatccttctaaaatgagagaatttaaatacagactcacaaaagaaaagcaatataaagatacagggagcagctactaaggaggctgaggcaggaggattgcttaatgccgagtgtttggggtcaatctaggcaagatacaagggggataatggggaacagatctctctctagtattagaagaagtacctgtggataccatgctttcagccttccaacctgcaggactgttgttcaacccaagtgtggtcctttcttctgatagtgctaccatgctaataaactagcaagatttggtattcctggcttatagctccatctttacctacagttcatagattatttccttgtttgcacatctgtctgccaatgccctttctgcttatgactaataggaatgtgactgttgatttatgaccacaggagtccagaatgacatcattgtaaccaatcacatatgctaccactccattttcaaacgtcacagtttgagctatgaggtgttcagattttaatgcaggaatggaggaggggacaaacccaattggtaacattcactttccatagattttttttaaaagcttacataatgtggcaccatgcccttcagcaagaggtgtggtggtggtcagctcccctctgagccacacttgtgacttactctgaattaaaatgccttggccatgctgagtgagggccagagctttggtctcaaaagcttggaaatttcttcctccccatcttagaatactgcctacagtccaggaacagaaatttccagaatcctagaagacaagggtctttgtgtaggggaccaaagttgctgcaacaaccagcaggcttatatgggtgaactcatttagcagacaaatgtgacacagtacctgttcttgtatgacctattacctaaaactattttatttcatatatatgtgtgtttacaaatacatatatatagttttcatagtgagaaaaatgaaaagaatcaccaaatgccaagacacacagttcaggctatagaacctacaaatagaccattctcagaacacacactcttcaggcatggtctggtcatttttgttatagtgcagacatgactattagctacagagaccatgtagcaatcaaaacctaaaatacagtctgcctctgtatccttggtaaccacagaaagaaaatattaaagaaaaagtgtcagtgctgaaaatatatggaacgtttttcttgccacccattcctaaatgatggaaccaaacagctggtctcagcatttacacataataggtaaaagtactctactgataatttaagatgtaggagagtgtacacaggtcatctgtggacattatggcaattcacatgagtatacacgggtcatatacagacactatggtgatgtagatgaggggtttgagaaccacatggcttttgatgaccctgtagagttggatatatttctcaggcagtccttcacagacgaggtttaccaacctttgtcctacacacagtcagttcttcagcttgtcacagacacactagtgagatgtagaggaccaagtcagggatgctcagtcaacccaaggctcaggggaaaagtcaattcttctgtaaaggattcaaacttaaggatgtttcgctatgccatgagagagaatatatttccatagattctattcatttctttttagattttgtgttagcttataaagaattaggctttatcatcgtgtttttgaattgaaaatcatatttgttgttttttcctcacccatcttcctccctttcttgtgccttagacatcctgtaaccatgtcacaggtgcccccctcctttttttaagtcagagtctcacaacgtagccttcaatggttaggaactcttggtgtagattaggctgacctcaaactcacagagatacatacacctgcctctgcttcccagggtcttggtattaaatgtctgagccaccactaactatacccaggccacatgtaaccttttgcccaccaccctccttttgaaaacacatctcttgttgtcctctggtggttggctatcttgttagataatcatcttctagagaatttacttacttgactttcagttaagaacaaaataattttcatatctgtttttgaaaataaaatgagtttgagaattaaatataaaccaaataaatataaaactttatacgaatggctatattttccaggtaacatacttaaataaaatatatagaaaaaaatgatcttttaaaaatattttattttttaattgtgtgtatatatgtgcatgtgaaagcaagagcctagagagtccagaagagtgagctgaattccctggtgctggagctgttgtaagctacctggtatggggttagaaactcacgccaatcctttgcaagagcaagtgctgtttaccactgagccatcccttcagcccctgattattttgtttgtttgtttgtttgcttgcttgcttgcttttagacaatgtagtgtgtattccaggctgacaaacatgatatgcacctaagaattatgtttaacttttgatcctcctgcctctaccttccatgcattgagattgcaatggtgttccactatacctggtttacatgatgctggggatttaacacagggctttgtgcatactaggccaacactctacaagagctgcattctctgtctgagaacaagtgattaataggatgaaaactctcagttaaatgttgttgaattctgtggtttgctttgaacttagaatattctaagttccgtttttctgaattttgtgctatttgtgctacttggacaagatgtctagactacttacaaaaactctttcctcattcatactggtaatgaatttgagctgctctgaaacaaacctagagagatattaattgtgttatgttgttttctgagcaagctatggtcaactggcttcctgtgtaaaaggcatcttctcatttaacttggggccatgcatgtctcaactacagcactgaggaaatcattaaattaagaaatagaatatctaagttctcatcctgtgccacctgaggcgtcttctccacaaaccaggtgaaagataatatttaacccattctttatatgctgaaagttatgtcagcaaagctaaaaaatacaacaaaatccttgctcccatgaaagagacttgtgtgtgtgtgtgtgtgtgtgtgtgtgtgtgtgtgtgtgtgtgtgtgtgtaacataaatggtactcatataagcaagaatgtactgtagactgcaagaatcccataaaggaaaacaaagcaagggatgatgcttttgtttggttggttctttttttcttttctaaggagccaaagagaggactgaacagaaattgacatgggtatctgatgacagagccttccaaatagagcacacagcatgtgaacaatccctgaggcagaagtgcacttagtactctgagaacatccacgaggcaggatggctatagcccaatgaggccagatcatgcagaactttctagattattgacagtatatggattttttcaaaggacaagatgaacactggagagcttgaagacagaaggggctttaaaaaaaaacgtgaatctagtgcttgcttcggtagcacatatgttaaaaacttgaatctatatttttatttaagtgtcatttaattttttttggttttttaagacagggtttctctgtgtagctttggagcctatcctggcactcgctctggagaccaggctggcctcaaattcccagagatccacctgcctctgcctcccaagtgctgggattaaagatgtgcgccaccaatgcccggcttgacacttaaatttttaaagctcttctgtcacctatattgagcattgactgcagggcaagggtggaagttgggagacaattggaagaatagtagagtaggccaagtgggtgtcgtgactgggtgcagcagataagtaaagagtgcatggaaaatggctatgcttgaaggtagaacctagttagatggaaaacttgtaaggtgtgagaacaaaacagagtccaagatgacatcaagtttttatttgagccgttggatagagacatgaactgacatccaccaaatagggaagaatgttccaggtgagaagaaattggagtttgatttggagcccttgaacctaaggcatctattagatatccagaagtaatagagagtatatattttaatttgagagtttggagttcagggggagtagtatgcttggggttttccactctattgggctggttgccattgtgagcactggagttccaatcctggtagacttcttgatagctgtgtgttagaaagtgtgtcatcttttctaagagtgagatagaggaagagccatgagctctcattctacacaagggtagaaccttaagctgttagcttttccagtcctgagacttctgtaggttctggaaagcccaagcaggtccttttagcaatcccatatgatatgatttctggtggctcccaaagatattgtgctaggcttgcaagatgtgctttaagttaaacacctatagataataaattagtctggattgtctatgtgatcccttagttcaaacacaagtgtttttggaaactaggtattttattaaatactgaataagacagtgtggtgaaaggagagagatagacagagagagagagagagaggcagagagagagagagagagagagagagagagagagagagagagagagagagagagctacatcattgactctggaggtggaagaagggaccatgagccaagaaatgtagatcataaatggaaaatacaagaaaacatattcttccctggagcctctagagctgtggttctcaaccttcctaatgttgtgatcctttaatacagttcctcatgttgtggtggcccccaaccataaaattattttcttgctacttcagaactataatttggctactattatgaatcataatgtaaatatctgtgttttcaggtggccttaggtgacccctacaaagagtcatttgacacccacaggttgagaaccacctctctagagggactgcactacctccaaggtctcacacacagaagaggcacttgtgtaaggaaaggagttaataagattactcttggatctgtctcttggcccaccagccttaaaggccaacagtgacccaatgctaatagtagtttccgatccagaagaatcttgctaagtccccttatgaaacatccttcccccacagcccacagaaaaaggactgctgatccaacataatctagagctgcaggaatcggaagcacacattctcaagtgagtccttgagaactatggctacagtgtcagacccagacactgtattatagccacttgagccacaaagccacacaccagtccttggttcactatatatactgcatcctaaaataacccattctggttctgtaatcttcctgagaagatgccatagcagggccacctccaggtgatttggtatacagtaggaaaaatgccttccataagggtctgttggataagatgttatcttcaccgtaaggtaggctcattgatctgtgttacggggggggggggcagcataccaatcaactgggcattctgtgagaccttagaagcggtgtgacgagcagcactggaggcagagaaagaaaaagcacattcagatggggtagatgtcagttaagataaggatggattactgcttcctccagtgtggaaggcttctacagagccctttctaatagtctagtaatcacaagattaatggtcagtgctgtagtgtggccaactggttccctcaccatagagtggcataacaaattctcagtgtcagtctctgcagctgtcaagagggcatttaactgtgagtgacaattactaatagagtctcaaggagaggaatcccgttggtgacccatccctgctgtgacggtcacttacaggcccattgctcaaggaccacagtggctgagaggaggcgctggcttctttccacagggtaatttagcccaaggactagttcagtgtttgctttttttcaggttgcaggcaggctcctctcatttccacatgactcccaaactcccttctctctggtcttccactcagtttccttctggtacccttgctagatagacatttacttttctctggcccatgtgtgtatgtatctcagtctgtctctcactttatataaacagagtctttctgaatggaacgagtattctgtaagcggtgtcccttggggtagctctgaggaatgccaggatgtgactcacacacgatgtgtcacccatttatgaagcagacttcaattgcttctgctattggttgaatacagggagctccttaagagttcataggtgacagccaggaacaaggaatctctacaacaaaggccaggtgtgtaccatgaccccaagtggtagtctattctttgttgtagatggcatggtcttgttccagagtccctgtatctgctctcaacctgttagaccttgacagatgctctattaagtactgatatctaccactcagcaagaaggaaatcatgcctggtgctgaaaactttgccaactacctactaatgaagtcgtagatattgtaggagaacctccaaccaccacgtcgttaaaacagaataatccctaacaacaattcaattatttatcttggtcatcacccctcatcaaggaaacttctcttcacagcagacagagatcattacagaaaatcacacccaatcaaaatgcagagttgtggagccccgtcctatttaggaaactacttcctcacctaaagatcagggcacatttcaggagagggagcaaagagatgggtcctaagagctggagagctagggagttttctgtgacactgtgtcttctaggaatgtcaaagctacacccatgaagtctcaccaacatgatttcctaaacatgagctgaacaagttcaataataagatggatgggagaaagcccatgaggcctcaactctacacaaagacctacaggaatgccaagagcaggagaaataatcttccccagagaaaagaacaccaactggttatccaataccaaatagtcagctctgaagacacacacacaagtaacattgtatagactgagcagggggtattgtatacagaaacagcaggcatttacacatgtctatgtatcaacaactaataaaaaaaggaggccatggacttgaaagagaacaagccaggatatataggagggcttggaaggagaaatgattatataacaatctttaaaaggaaaggaaataatttaaaaagaaaaagaaaaaactccctaaattttaaagtgagaaagaacaaaaccgaatggaaactcacacatagagtactgagaaggacaaatgtgtgaacagatacatgttggtcttaggttttcaatttcacgagagcatttcctgcctaaagcaaagacagtaacagtagggaaaatgagttcgtcatgaattgatcccattcctctccaagacataggtccccaccccaagaacttggagaaattcctactgataggagatgcacaaagtgctttgctttaacatcaatgacaggacagagtcactcggtttaaaaccctttcatagaaaaggaagcctgaatgtcaaattctcaaccttctgaaattccatgtcctgaactataaccaagaactgaattggtctgcatggtttctcagacccgagactttttaagagttgagataatggaatatgctgatgttttataagtgaaggaaacaaatgttctataaataactgctatttggaaatcccctctcagcttgcacctagagacagaatccagattttaaccaatctctccaaacatttacaatttgctctttggctcactgcttatattccattatagatcaagccaaatgcatcctggcctgattaaataaaagaaaaactgagtactccaagcaggtaagtgaaccaataaagctggagaggctagcaaagacataaactacaggttatggggacaataaaggactccagtgacacatagataaagagcagagcgactttttctattaaaatgacctcaagactaaagactcacttgctggagggacatataaggtcccccaggacccaacggcaggcagggcagcaggcggcatgggggttagcacagtccttctgccagctacccaggcctgtagtctcttatcgccacctctccctgcatatctactcgccttgtggttagtggctgtgggtcctgatgtacaaatttggggggggggcagtaggatatttatttatttatttcatttattttacatactaaccacagcttcacctccctcttctcctcctgttcccccccctgcctcccatctactaccctcctctcattcactccccgtctttctccattcagaaaggggcagggctcccctgagagtcaataaagcatggcacatcaagttgaggcagattcaagctcctccctcttcatcaaggctgggcaaggcaacccagcacaggatatgggctcctagaagccagctcaagagccagagacaggtcctgatgccactgctgggagccccacaaacagactatgctacacaactgtcacacacatgcagagggcctaggtgggtcccatgtagccccccccccagctgttgacccagagtccatgagctcccaggagctcaggtcacctgtttctgtgggttcccctgtcatgaccttgacccctccgactcctacaatccttcctccctctcttcaacaggactccaagagcttggcccagtgcttggctgtggatctctgcatctgcttccaccagttactggatgaaggctctctgatgacaattagtgtaatcaccaatctgattacaggagaaggccagttcatggatctacttttgaaatggagtttgctgtcgtggttgtgaggtgccaggtgagtgctgggaattgaatccaggccctctggaagagcagcaagttctcttaaccacagagccatttctctagctccagtggcctgaggcttcactgctcaagaaaggctgggaaccctggctccatccctcttcatatctgtgcccttaacaacataattaatctttgtaaagtagctctttgaaagacgtgcatattgcttcctgtttccgtttatttgtgttctcctttctcccatactgtgtgattcttatccattattatatcccatagtgtctaccaatatgagcacagtaacagactgtatgtaggaagctacacccataaagtctcaccaacatgaaggtccaaacacaaactgaacacggacaacacagatagacatgccaaagtggatggggaaaagctcctgaggccttcaccctaccgaaagaactcaggcagctatggaaggctgagcacaggagaaatagtctttcccagggaacagaatgctaaccgcttgtccaataccaaatggtcatccctgaacacacacacaagtaacattgtgcagactgagcaggttatatttaggaatatatatgtatatgcatatatgcatgtaataacaattaacaaaaaaggggggtgatgaatttgaaagacagcaaggagggggtatatgggagggttatggagggaggaataaggagggggaagtgaaaacaaaaaacaaaacaagaagggagggtgctgtctaatttcaatttttctaagggtcattttttcctcaatgtttggaaaaacattattaattcattggagacctactccaggcaagaccctgagtcaagttgctgtgacagggaaagggaaggcgggtaaggaataagcctttccttgaagacggttcagtccagacaggcaggcaagcatcttagtcatctgccccagggcttttctctcctctcccacaacatgtgactgtagggaaccattttgggaatagaaactttgggattgttgggagcagaggtgctttctgggtggacaaccccgcttgctgggttgtcgcctcggtcacaaccaccctgtgtgcctttttcttataaaacatattagacatcaagaagccatgtgagtcttttctagaaggcccaggttatttcctcaatgatccccagggaagcaagcaggaagcaggcaggaaggtgatgaagaggggccctatcctgccccctgcttccttgtacccctttaaaggattacaccctcacatgcgcaccccttttccctatcttcctattccctatttctcaggaatattccaggacttatgaatggactggaggaagcagagatctgggcctgtgaatgagcacagagggtgcagtgagctaagaaggggtggaggtggaagtggagactgatctccttgaccaggcagagggttaacttatgctggtagtgcccaccccttgcagcccaggcaacggctttccctttgacagacctttggtcttgcttcatggaaaacattggttctatccctgtcaatagctctgttcttcactattcagggttactgtggtaaatgacaatgatgggtgccaccatccctgatttctccctcttcccagctaaatgaatgagaagacaataagagtagagactgaacagtctcatagcaaggaaatatagtgctaatgtgaatcccagaaggatcttgccagcggtgtccatagaagtgttggtccctgggatcacggaagacatcagtggacatttgagctcaggtgtgatgatgccttctccagctattcttttgtacattctggatgtacagtgcatacccactttatcatgtatttctgctgctccctgtgcccatagactataagtgggttggcagcatagatattgtcctgtcaccatcagcagctggaaacaacctacctaagcctgcccccataccaactctggcacacaataatttttgttaaagaaatcctttgccttcattgtatttagtaggctccccacccatctcttctctaagctgtcatagttacactatgaagtcagccaatgattgatgaagaaagatatgtacaaagataaataaaagacagattgtcttccaggcttgcagcaggaggggtagggagttctagctcgattgacagatctccagccacaccaaggaatggctatgccataactacagagggtggaacagttgaccgacagtagttaagaaaaaaggacagctcatggaccaagaagctgcagcatgtctcctagctgccccattgctgtgatctgtctgtgagcagacagatggttctactctcagaacttgaagccataatatatttgagtcatacacataactcctcttgttccaaccacattctcaccaagcgactggaaaattacagtttgagtttcccgtgcatttagcaatggcccatgttgttattagaaggttataaggggcttatcaaacctatctgcttcaatctaaaagatatgagtgaatgcaaagggattccatgggcttctggtttgcttgcctcaaagccacttcgtccttatatttcccctctggggaaaacattgacttctccagtataattaattgtaccttctcctcacaggttctcagaggagggtggcacccacacttgccaagtcttggaactccttgcatcgacttatagaagcttggctaaacaactcacaggaacttaccttgggaaatttgtctggattctgggatgaaagaaatattctactggaatttctgtctccagacagcaccagcctgtgctgccagcaccctgtaggggtgggtaaggggaggccagagtctcagaaaggagcaaggttatgtagcagggaagaaaaaaaaccccaaacccagccatggatgaagcttcactaattattagacataataccgtccctgtttccctatttgaattcctagccattctcaactaggggtcctaagtaatgcagtatattttaaaacatggagtaaaagaaatgaaactagacagaaaaatgtgaaactagaagtaaaatgaacacaggttctcaaacatgctaaccttaactttcagtacacttgctggtgtgaatcacaaagccaacccagaaggaattttgctttgttttgtcacgacacttacccagaagatggaaactaaccaagacactcagaaatgtaactagtcctaattatgagcttgaaaggagttctctacctggggaccttgatgaagaagatgctgtgtaaggcaaagagccacatcctcaccaacatcccaagagtaagaacagtgacaaggcagtgtgtctcctggcactgctccttacagcatcctgaaaagcaaactgatgatgatacaacactgagcacaactcaacgagaacagcttgctccctgctgacacagggttctgatttgtcaccaacgccagtgcatttggcacctgtctcattctctgcatcttttctagaactattataacaaccatgaagcttgggcttctttattagtgttatcccatgatagtgaagatgtttctagagaggacaaagagactggaaagtattttctgtgtctttcccaatgctctctaaaatggtttcatttctattttgttttatgtgtgtggtggtggtggttgtggtgtgtgtgtgtgtgtgtgtgtgtgtgtgtgtgtgtgtgtgtgtgtgtaaatgcatatgtagttgacattgggagccttcctcaattacattactcactgtcttagtttgggttttgttgatgtaaaaagacaccatgcccatggcaactgtgcttttgcttttgttttttgagacagggtttctgtgtgtaacagtcctggcaatcctggaactcactctctagaccacactacctttgaacttacagatatctgcctgcctctgcctcccaagtgctgggattaaaggcatgtgccaccactgcctggatgccatggcaactcttataaaggggctggcatacagttcagaggtttagtccattattgttatggcaggaagcctggcagcatgcagacagacatggtgccggagaggtagttgagagttctacatctgattagcaagcagcaggaagagagagatacagtgagcctggcttgagcatctgaaacctcaaagcccacccccagtgacacgctacctccaataaggccatgagcatctgggggctattttcatccaaaccactacactcaccttattttttgagacatgaacctgggactccctaacttgcttgactagcttgccagaaagtcctaagggtcctcctattcctgccctcacagcgccagggttacaggtgtgcaccacattgtccacttttcacatggatgctggagatctggactcagatcataatgcccagcaagcattcagattacccatcttcccagtcatttgtctgcacctctcaggccacatatccccccacccccatcttcttcagggtttggtgaatctgttggtgctgagcacagaaagtctatctatctcattgttgtgattttaaataaaactagcacaggacagatgaagaaaatgaccattagtagtctggatgtcagcataagcttcagtcgcagtaggccaatgtttaaccatggaatacacattgtcaaaggtcagacccattcaatggaagacagtcaagttactaggttttgccttgaacatcctcagcagatagctggaccttggctaatgatgtctttcagcattctgcagatcagcaaggcaacttaaacaccaggaccccaaggccatcaagcataattgagcatagcaagtgatttcacagcctactacttccttataaaagggatcaatattgggtgtctcttgatctttaccagtttttgaaagaatgaatgtgctaatggtttcacatgaccttgctaaatgcacctggggtccacaggttccatgcaggaggtggagtgtgggactctgtgtggacaacagtcatggtttcctaaatttctgttcttggagtggtgtcaaaacttgcagagtttgaattgtattgcagagccatggtaacaaaacagtatgatactgtgccaaaccagatatatagacaaatggaatagactgtaggatccagaaataagtccacacagtcacaaccacctgattttgacagggatctcagatacatacattgtgaaaagaacctgttcaacaaatggtgtttggaaacctggatttccacataagggacaatgagactgtgttcaaatctctcaccctgtgcaaaaatcaatccataatggatcctagccctcaatgtaagatatgagactatcaaacttcaagggaaaccatagcaagatgcttgaatacctaagctaaggcaagggctgtctgagaggggctctaatagctcaggaagtactcttaagactgacatacaggctgtgtgacatttcaaagcttatgagtagcaaagaaaaaaaatcaccagtatgtagagacagccttcagaatgggaaaatcttccaattgtacttcagacaaggattaatatctagaatctacaagagctgcaaaagaaagcttaaaataacaaatcatttaatcaataaataggccactgaacagaaaagacagttttccaaagacatatagatttcaaataaatatgtgaaagcatatttaaactccccagccatcaagggtatgtggaatcaaactacattgagattcttctttatcctagtcaaaatggctgctatcaagaaaataacaacagggcggagatacctggccctgcctggccctcagtggtgtagccctgtgacagaagtgagcaagtatctagtgagagatgtgagagacagagaagtggttcatgaagagggagaactggaaatctgatggctgtgaggaacagcctgatgtgacaggcctgtgctgccaccggaggccatggcgatgtctcggactgtgctacgaccgagggccatgtctgggtctggggtcctgctgcagccaagttctgtgttcatgtgggtggcctgtgttatcacaaggtcatgcagatttctgtggcctgatgtcatattgacgtcccagagcctaactgagccggccaccacatggtggcgccagcagtgaagtgtgagagagccggccctggccattgcctgggcagcatgggagagccggccctggtggcaaagaagcctgagacctacccccatggcatgagtgtgggagacttggtcccacccctcatccaatgcccatgaggaagaactggtctcatccttctctgtccttgtgggagagctggccctggtggagtgggcatgggagagttggcctccatggagtgggttcaggaggtctggtgggttaattaactcagctaccacccaggcccagatccaggcctttgatttggcccaccccaacatctcctccatctacgagcttccggagctcatgaaggggcctgtcttgtggattcaaagccacaggatatccatgactcagggcagcagcaacgtatctgagagtctctttgagggttcagtatggacagtgtagtagaagtcagaggctttgaactagaggaatgactcactgcaatgagcattttcaagtagagctgtttgggcaaaagggtatactgagtgacacatggcagctgccaatgtcactacaataaactaatatgcgatggagaggtggaactgtggttaagagaggaccgaggactatgcacagccggctgtgg

SEQ ID NO: 42 - DNA, 59432 bp, Cricetulus griseus
  >scaffold_56 dna:scaffold scaffold:CHOK1GS_HDv1:scaffold_56:3494926:3554357:1
agtagggctcgggttatacccaggaactcctgagtcctggagtagagcccgagccctactggtaagaagcctcacagtggacacttttattcccactccttgcctctgattgaagggctgtgtgcatttcaattgggcgtggagccaataagaagagagatctcaatgccatcactgggggcaaatcctgatgttctcttggaaatctgcgtcagaactgctgattcatttctccctccctcctaaacgtgtgctgccagagaagcagcgaaattgaaagcatgacatgaaaaaacataatttgtactggacaaaactccaattgtaaaaacgaaaaaataccaagtggtggaaggtaggggtgattatatattaggttgcttggggctacatccggacaatctgcatgaaagccccctgtaatgcctggacctgaatgattgcgaaagtaggcagccaagagctgaatgctcctggcattttctgatatgccctgttatatttcctaagagcaatgttaaatgattcaattttagcttttgttcaatatatgtacattagtgccgggaaagtagtgattatattttaagtggaaatcatcattgcaaggcctcctgggctgggaatcaaacaatccctccctttgctgaatcccaccggctctttctctcttagctgttaggagatgtctgcattgcatggctcagtgtacagctgggctcgtgttttatccaatatcaagtgagtcctggtgtaaagcatgaggctgactgataggaaactgtgttgtcgatgctttattagcacttcttgcctccaaaggactgtgtgcattcaaatcaggcaaaaaataggaaccgatgaggaaccgaccttaattccagcactggacacaaatcctgtgttaatcttagaggtctgcatctgagctggggattcattcttccctcccactcaaatgggtgttgcagcacaagaagtaaaagtgaaagtggatgattagaataaatgtaatataccctggggtctgacctcagctatcaataggaaaaaaaactgtcctgtagcaagtagagccgggattacatatgtagcaggttgtgtattcagcctggatactgtcatataattttctatttctgcatggagcatgatgattgtgattctggccattgctgctaacttttctaatatataaagtcagattcccaaagttcaatctttgcctgttgaattctagttttatcctatatatacaggtaagtggttgaaatagtacatggaattcttactttcaagccctgctctgaatacctcttgtttgtatgtcatagctaacattgtgaagatatttatgcactgacctgagatattgcatttaggaaaatatactcataacatatgtatactatgaacaaattcacaatttttacataatcttatttgagtttcttcctcacacatctgaatatatttgacatactttttggaatctcagtgccaaacacattttgaaatagtcttttcagtattaatacattccctttactagattttttcctgaatgattctttttatttcaaaataatctattctcaatatatagaccaatcctgttcccactctctcctatttttctgctttccaaaccttcctgcaaaccatcccatccgtttctaagagagggtaagacttacaatggtgagtcaaggaagtctggcctgtctttttgtgccagcaccaaggccttccccactacatctctgtggagcaaggtatcctgccaaagagaatggcctccaaaaagccagtaaaagcattagtgataaatcatgctcccattgccagtggacccactggctgaccaagccgcacagctttttcccacactcagagagccaagcttggttccatgcaggtcccaagctgacagtctggaatgagagatctgaagtggtcagttgcctctcttgttatctttactccatctcttttactggactctgggaaatccttaactcgaattcttatccaatcactactcaatccttatttcctaaacttattctctttatttgtgacatctgcattcagataaaccatggatagggggccaactactagaaaatgtgcagcctcatgactaacatgacaaataaatatagagttttaaacaaactcattaaataatataaagcaatataatatcctttaggctcaacgttcttccacaggatatctagtatgttccccaggttttagcggtaaagaattatgcatgcaaactcagctgatggaaattccagactataagcatgctgaaatacccacaacaagtagttacaagcacatgtatattagcaaatccattagcataacactgctcacaggttttgaatttgaaatcatggtatacaagctggccaataaaactcacagttctcactttcactactttggcttcatgtcttgggattggatattaatgtttgtatgactgatttctaatatgtgatataatagttgcaatttgttcatatttccaagcactcagtttactgatatggccatttaagtggctgaataaactaaaaaagaaaaatgaaagtaacctgggtcatgtcacccagagaccccacaatctattctagtactttcctatctcttatgctgtcctttcatttcccctacttcaaacatttgtgatctgacacatgaattaaaattttaggattaatcaattatgtctgctgtacttatgtaaacaccatatatatgaaataagatcaatgctgaatactctccacatctacaatctgtgatccttgaatcactatattcccttttccttctttttgaaaatatggtactttttaggagtttttacacgattgatgtattagagactgtccaccaagccattaatatagttattaattctatgcatgtcgaatatgctgtgttaatgtaaaagttcagctaacagaactacagtgtttttcctgtaaatgtgattaatttagcaacattcccacatgtcattatttatcaacaagaagactgttagtgtcttggatcacaaagacatgtctggaatttttactctagatttctaaactaaagcagaaatatcatacacatgaaaacaaatgatgcttatggactcataagcagactatgtatctgcatctttccagaagccaaagattttctagttgtgtcatcaatatttagacttatacccacagacaacattaactgtaactttcagaaaaagacataatttacacaattccacaactactcgaatttaaattctgtgtctaaccacaactgatcaataaatacaatctccagtattcttagacccagaaaatattgcctgcaatggacagccacctcatattctggttctatggaaaaggatatgtgttgtaagttaccagagttttttgaaagggaagggaatttcaaagcattgaatttgccagttatagtatgcaatatgaccagtaaatctcagagatctaagtgatagtgattttggagtgtcaattgctgcttgttgatgctattctatgatatgacataccagattcccatggaaatattatttccaaacctgcccagaaatacacagtttacataccaaatctaaaaatgtcatgatgtgtaagaaataatcatgtttatttatttttgatagaaatattcataatacatgtatacaattgcagtctttaatgtatgattttatgtgtggtttgacagatgtcttcatgcatgctttatttggtttgaagcaggtcactcagaacacctgtgtgggaaatcccaacaaatcctgcctgtccttgattttcaatttctatatctcccgcaggcctcacagacactctttgcattgtggttagtcaatttgatcttatgagccagtgttgacattaaagatattctgcattaagaaatatgtatgcagcatcatatctccatgattgtctagaaattcagggttaattcaggcttttcttcaatctctgcttagagcagtgtactaaaacaggtgacccaaccaaacacatatatttcctcatacctagttttttcagacatcagtttccatgtctatatttctcctgcctacaatttcaacagctaaaatattcaagaacctgagagtagatgaatcacatgcctatggaaaatcttcctgctcttcttctggaacaggaacatagaaatagaaggacccctactgacacattcatatatgcatatatatgtgcaaccctggtcctcatctgagagccttctacctgcaatggatgaggaataacactgagatgctcaggtagaatatgcatggataaaaagagactttgtggtattagcatctaaacaagatgttcatccaaaccctccactaaagcctatgttgaaaaggaagcagagagtttgtaacaaggccagaagaagtaggtgactccaagaaacaaggtgttttgttttcttttttatattagtatctatgcctctatttacccccaaagaattaggttatcactatttatataatgttggtaatatgaaccaagcattgtggttgggcataaactggatgcttgctttgtgcatgagtaaattctaagatgtttcctgaggcccacagaagttctttaaggtagctatatacgtattgcaaacaagctgatactgaggcaaagaattagttcatcaaagcaggctctcctgagatcttttcctatgacatcaccgtgatgtgtgactactttgatactatgagaaattgcattctaattgtttagatattgtggaaacagtgatgtagtacgtttacaatgcaggaaggatgcatttgaaaatagagatgtagatttcagatacccatcaatctcctgaaaaatgaagacacaatgttaggaatagagcccctggtaaataaatattatcagcctgcaagtatgtattcattttcaaacaaacctaaatgttcctagctttagttctatataaggaacttcagaattattctttcagccaaatccagtagatggcagggtgctgctactaaggaccaacaaacttcactctctgtgcagaatgctgcagctcacctagcagagaaaagaccattttctttatatctatgcagacctcattgtctgacaggaattctcctaaaactgtcatcagcctgaaaaaacaagttgtaggtaatagccttggagatgtgggaaaattttgcttaaagcattttacatctttttgggaaaacattttaactgaaaagagattcttctcttatgcaatacaaccctaccactagttttccttcctctattccttccagcaacaaattagttcccctgtttactagatatagttttccctatcccaccttcaaaaaaaagatgagagagcaaaagcaataagtcaagacaaatgccctcacaccaagcctggacaaggtaacccaattttaagaaagagtcacaagactatgcaaaagaataaaatatataactgttgccacagttaggagtcccacaaaaaaaatcaaagaacaacaacataaatgcacaagacctggcacaaacaattcaggccctgtgtcagcttaatttcaagccctgctctgaagggaaaaattgcatgctgtatccaacagtttcctaaatatcaagcaataatttgcactattccttttagatagaaatatttatgatatattttttcaataattttaatgtatataactttatttaaatttcatttcaaatatatccatgtgcatttgacattaattttttcacagtgccttattatacttatgctctattaatatttaaatactacctatatttttcctatttgaaatattatgtattaaagtaacatatcccactagttagcacttatccttatctgtgtagttaagtgtaaataaatgccattaaaatctctaaatcattaagttatgaaaatattaactacaatgtggatttatagctataatgtatgagaagcattaataatccaacaatattaagggaattccataatataatacttgtaatattgagcatacattttagtttacatggtattttatgactgaggttatttaatattttatttttaaatttttattggaaacaagcttcttttacatttcattcccagttccttctccctctccttataccctgtcccaccaatccccatcccaactcatttcttctccacagggagggcaaggccctccatggggaatcttcaatgtctgtcatatcatttggagcaggacctagaccctcccttgggtgtctagactaagaggttattcctccatgtggagaggactcccaaatttcattcctgtattaaggataagtactaatccactaccagagtcccaatatatttcccagacctccaaactgacattcagtctcaggaggtcttgaacagttgtatgtggtttcctagctatcagtctggagtccatgagcaacctccttttcaattaagctatccctgtgtgtttctccagtcttgtttggagccctttgttcatcgctcctccctctctgcaactggattccagagttcagctcagtgtttagcggagggtgtctgcctctgcttccatcagctattgaatgaaagatctgggatagcatataatgtagtcatcaatcttattatcagacaagggcatttaaggtgaccattcaaccactgcttagatagttagtggggtcaaactcatagatctctggatgtttccctagtttattgtaagtatcaacaaagtcactaccttaacttcactagaatttctctccaatcaattctccatgccctagtttacacaggttatgttcattccccccaccctgagggaaatcaatgtatacctattagggtcctcattgttacccttgttctctgggaatgtggattgcttgaaaacttgactttaaaactagtatacacttggaagtgaatttgtattatgtttgtctatctgggaacaggtttcctcattcaggatgaatttttgaagatccatccttttgaatgtagtttcatagaatattgcaattttgagaatatgcagtaccttcacttcatagagctggcatacaggaggaaatctgcattgcttctttcatttgctgattataagccacttcaataacctaatggcttccagataaaaccatggggtaattagacattcccttgtagtgatattatttttgatttattaaagtttccctgagtattgagaatgcaagatacacctcaagctatagagatcagtcattgctggtgcatacctttaatgacaagcctcagaaaatatattccatgatttataatgtaataattatgaacacaaacataactgaaaggaattcaagaggtataatagcaatgtccatttgacttactgtttgtcacaggtaaggaatttgccaataattgtaggaaagtcaactcaaaaatcttactgttactgtgtatccatcatgtcctaggattggatggtaatgaaatatgtctggtctttaatatgtgaattctaatgataggtaccagttcctcataaatgcaagtaatcaggtagtgatattgctatataagaggctaattacagcataaaaagaaaagcaaggagaaatatggggacaaactcagagactccacagatggtggatgtccttctgtgtatgtttttcttattggttgttgaataaatcattgttggccaataagggagcaagttaggcggaattaggaatcaaagaggattctgggaaatatattaatgtcttgtgattcaggcagggagtgacataaaagacaaactcagaatataagcaggaacaaacatgaaatcccattcttcctcttcctcctgctctcctctctgtgcagttaccatgtgagcccagtaagacaggacaactcccgccagcaccccccgtatgacaagtctttataaaatatatagattaagaaatcctagtcattggccaggagcattgtacccaatataaatctctgtgtgttacttttggccccatgtgggggcaggcagaattcgtgcagccatggaaagatttatttttacaaatttgtgtgaggaggataaccacacactcagaggttcccataggaagaggggaatctcccaccacagcctgcccttttgagcctcttggcagcattagagcagcttccatatgctcttgccaacccatgctcttgggggttggactcagcactccggagatgacctacagatctcaacagttttatgggttaggattctggcctcttgagccaccttcccatgaatagtcaagtggcatcagaacctgggcagctggtggtagtgttttaacaacttcctcaactccacaaaagcttaaaaattgattttagaagcaaaggaacagagacaagcacagcttctttctacagtggtctctgtttgtcagagacaagcagaggctcatggctcctttaagagaggcttcctgactcaacataagtggcaaaaaccacaaggctctttagaggtctttctaacacttcaatggtatgtatgagcagctggcagtggcagtgacctcatctccaagccggaagtgtgctgcttgattgcagcatagaccagggtagtgagcacaactctcactgctgacagtaaacatatgcaccccatcttgaacagacagcagctaaaacagtcactgctttaattttagcaatgttgtttaccagatcaaagactgtttggccagaaataggtaaagatctacagtaaagaaagattcagataaagaaatacctctaaagttttaagctgtatttaaaagtatacataggcttgtgagataaaagaagcagggtaaagtaattaaaagaaattaggagaagcaggtggttatggagcatgatggtaggatctgcggaaggaagcagaggcaggcagagttccatatagaaaccttgtatcataaaagtaaaatataaaagtaaaattaacagagtactgaaaaagccatgtaaataaggaaaatacatagagagtctggatactgtatggtatattgttgtctttaaattatttgattgctgaggaaagagttacagctgccaaaatgcatttaattataaatgttgctgaattataccaacttatacattttaaaaaagcttaaacttctaaatttaaaaatgtggacacgttacttgggaaagtagtttttgcttgtgtttcacagaaaatgaatacatatttattccttccagactaatatgtattgatcaagcaagacccactgaagcagtggcccaactgatgctacatccaaatcagctgagatgatgcagccatagacaactacagacaggatttctgcgtttaatcatgatccccatggtatggacatttcccccaatgagcagaaagcagtttggaatgatcgatgcccaaattcccaaatattatttataaatgtttgttttcacgtaaatggaattggttacaaatggtaatgatcacagtcaatctctttttaaggaaaaaaaaaggggaataggatgtaaaaatgaatactttggattggtattgattatcatttattgataaaaatataagggtatttttctgatgtgtaaacatctcctcttatttaggtattgtttaaactgatcttttaaaatgaaatgaataattaaatatagaatatatagtcacctataatagacagaactcataattacgttagtttggttttctagatacacagaggtgtatttgagatggatagatatatttaaacctttcaaagatctacagaatatatggaatttaaatggtttaggggttttcatgacaatgagacaaaactgctcctggaacaccaataacttctgagaggaagatgggcatcaaagaaactcattatggaatttcattatggagttgtgttcaacattgcaagattagccatttgggcaagagactgttccttcctggactgtttgttgctgcataaagtggacatacatgacccacaggaaagtgactgctgaacttgcaaaaaagacagtcctgaagggttccctgcttcaaggagaagtgtgccagacacaatgtgcccgataggcttaagatggatgccctaacgttacagaggaattttgggtgactgtacaggcagtgagatgtctgtgtcagttctaaaatttatatattatccttctgtggtatttgatggagttgaagacagatagttatggttatagtttctttagttattataaaagataagctacatataagactttagactaacaaaataagataaatgatagaatattttctttaaatcatggtaaatattaatgcaataatattgtaactatagttcttaatttataactgtttggttatatattttactatgttaatggtaaaacccttctttttatttagacagaaaagagaagatgaggagaaatctttctctgtatgtttatcttattggttgttgaaaaaagcactgttggccaataagggggcaagttaggtgggactaggagtagaagaggattctggaaaatatagtaaagtcttgtcattcagccaggaagtaatatagcaggcagacttagaatataatcagggtcaaacaggaaatatctctctcttcctgttcctcctgctctgttctctgtgcatctgcaatgtgagcccgggaagacaggatgcctgccactggcatccccaataaggtaagtctttataaaatatatagattaagaaattctatttattggccagtagcattgtacataatataaatctctgtgtgctactttgggcctcatatggctgtgagcagaactcaggcagtggtggaaagatatattattataccccacagttcttcctattatataagtatctattctactgctttcctatctctgatgctatccccagcattccttcactttcagaattttgtgtgcctcctgtataaaaacattaggatcaatcaagactgacaactttgccagttactgtaggaagaataaaactcttcattatctttaggtacatgactaaagaagaaaattgtcggcattcttaagatacacctttgtcacggtggcttaagtattttggtggtaaacaactactttgaggatcatgactaaatccatgggattgaagaagcataccatactgctaaaatatccaaaacctgagaacagaatagtcacagccttatgcaaaatctatttctctcattctgatataggaatatagagataaaataatccctaattgatacattgatatacccatatttctatgaatccgttgcactaataagacatgtttcttcatgcactatatgggaaataaaataacactctccaggtgacctttttctttagtgcttgacaggatttggaatattatggagtgatgtgatttaccttcatcaggctgttcccttaaactgcaattatctatactgagaaggacacaaaaagattgtagcatctaacagatagatgttcccatagaaatgttttccaggcttcaatttactttcagtcagaggaattctgagtctgaagtagcaaacacaagtcttgcacaggaaaaaaaaaacatacaaaatcacctaaacagagaacaaagatatctgatatgttaacaactttcaagggaagtaaataatatcatttgtcaccatagttaaaaaatagatttcaaacaatcctcttgcctggaatgtgattcctagagaggaatggggctgataaggaagaggggaaaaaaggattaggttctgtatatgccaaaatggaagaaaatgcaaaccaaattataaagttgaatatgtgaatctacatggcaacaagatgataacaagtaaatctcctgtattatatgttatttcccccaatatttccacatattctaagcactgatagtaaaaactgacaatgctatagcaattcccaaagtggataccagaggacagaaagagtctgactaacctagtgttcctaagacactaaagtctgaaatggattttttccttgcaaatgatacagcacttgaggactgagacagggataggacatattaaaatagcagcagtagcttcagaagcaggatacactttttcaaaagacacaggagcaggtgactgagagttttaatggttggaatcaaaaaatcactgcctttgctgattcccatgtctctatctcctgtagatgacagtagcagtctgccttgtctgggtcagtgtactgtctggctctgatcatacccagaatcgactgagacctggagtatagccagagactgactggtgagaagttgcactgttgaagcttttattattactccttgcctctgattaaaggactatgtgatcaagttgagcatggaataagaacaaaaaaagcagagtgatctcaattccagcaacggtagcaaatccagtcattctcttagagctctccatcacaagtgttgattcactattctcccccacctggatatgtgtgcaccagatacagagaaattgaaattggatgagagcagaaaaaatgcaacttaccttttctctgactccgaatttcaaaagaaaaaaaaaacaggtagcaagtactagatgattatatatctggctgcttggacttacatcccaactatatatgtgaaagcctccatttctgtctgaacgaagctggttttgatcctgggctgcccatagctgcttgctgataacatttttgatatgctgtgtcagaatccccaattacgatgataaatgctgaatttaaatggtttttcatgtctttctttggacatagatgaaatttcctcactcagaagtggatattagacataaagcaaaggataccctacctacagtaaataatcctagtgaaactaggtaacaaagatgatggtaagagaaatatacatgtatctccctggcaatgggacatagacaagaaatccacaatgatttagtgataatgaagtggacaaggaaggatggaagtagagagaagcagtgaggaggggagtgttaggagaacatgagagaatgggatggtccagatggaagaataagagatgagaccaaggaatgagatatcttgacagagggagatattatggggttagggaggcaccaagaaatttccctgtgatctacaaaaaagacacacaccctcccccgctaaaattctaagcaacacattagagtgttcctgaactgtccttcaactataatcatactgacagcaaccttaattgtcatcatggaaacttcatccagtaaatgatataagcagatgcagctatatacaactaaatacttggtcaagcttcaggtgtcaatttgaaaagatcaagttacaataatataaacaaaggggtcagtcccataatgggaaacttaaagaaactgccaacaagatctagcatacttcttagtgagttgatgtcacaaagccacttataaatagtttatgctattcttgggaaacaattcaaccttacttcgtgacagctgagaatgtatgctgaaattgtaaacttggccaaggaccatggatgcagaaatgatgaactctggactactaggtacctctaccaattttcagtaacagtatacttccatgactatatgcaaaatatgacagggagctacaatcatggtaatattctgggatattgaattaatgtggaagtaaccaagaaaattttatttcttttaagggtcagttcatgagatggaagctatacataaaactgctaaagtagccaaccacctgagtttatataagatatatttatataaaaaacctacttctatttttatgctattggaagaatgaaataaaatgattactaataaaatattgttaaactcatgaatcagttaattgctcaaaccacagaaggggtgcttcttcatggggaaatgggctgatgggaaataacatggagattttccaccagtctaagggtagagtgtgagaaactttgcaggaaaaggtcataaatgggctatgtttaccaaaatttactcttaaatatttgtttgtctgtgtggaagagaatgcagatagattgtgagagcagcaatagaagaagtcgatgcataacagttttcattcacaacaggactgacacacagaagaccacacagcaaatactgcagcagacacaaatttctgtacaggcttaaatcaggcaaaatgccagctctggagtggaaagtagacaaaaactacaacctctatcaaggagttatttataattgttatgtgctaggaaatttatatttactccaaagaaatgtcactggttaatattaaccactcattcatgtaaacctcagcaatagtataaatttgccaacaccaaatggactaaatttttgttgctttgtttatttctgcattttattttcagaatatatatatatatatatatatatatatatatatatatatatatatatatatattcactttattggctttattttggatattttgagtttacttatcccttgctttgttattttcggggtgtatagaaaagtaaagagaaacagagagtgagaatgattgctatcatttaagactatgtaaagataggatattagggagttggggaggagctggaaaacatgagggagaggacagaatgtaatcacaaaattttgaaagaataaaacttttaaaaatccctactttaaaactatgcacaaagtaacgcaaacgaaaagatttcaatatctagaattatttatcacaaggacaaagcataagtgacttaattgtgaaggcttgtatcaactttttaaaagagtttaagcttatgatacattaataactaaatatcaaaacttacatgatcatctgaaagtacagagcaaagtatttcagaaatccaatgaaccttcatgatttgaaaaataattctcaaatattacttaaagagatgatataggacaaaaaactgaatatctaatgtgcagatgttaaattcatcagtatattggaattttaaagataatccaaaaatatcatgtattggcactgatatttgacactgttcacaacaaagttcatagaggatatgaataatgatcttaagtattgacggttaatgtagagaaggtaatttctaattttatgaagttgtaaaattatgtatagaaaaccacaagttataaatatatagttacataagaacataattcttccaccttgtagtaaatgagaaaatatcttatttcaattaatttcatcaggcaaagtaaataaatgttgttgtagatgaaaatgggaggttgttttacaataccgtctgcagcaggtggtcacatacatctgttggtcccttaagatcctaaaattgtggccttcttgaagagtgtgagatcctggtgtttagcacatacagactctgtttcagaaatacatgacatacaatgaaagaacaaaatttaaataagtgtaccctatgtatactttcagctacaaacacaaaggtaatatggatagaaatattgaaatacagaacttaacagtggctgtagagaaattatgtaatgaaagcagtgcaattcaccaagaacataacaatgagatacatgaaaaaggggaatgctatcgtctatttgaaagccccctagattatgaagtactctcttacactttatgaataaaaatgataaaattcgaaataaatacttaacctttgagttccatacatttaattttatatgaattgtttacaaaacttgcatataccatatatttaaattaaaacatctattatttatacataatactaactaaaactaagagcctacattttcaaatgcttctttctgaattctgtgggttgttttcctatcttgttttagtgaaatcagaattaattatgaaaaaaattttgaattgatcatctatgcaaattcctaagttattttgatggcaaatcatttcaattcaaggtactaactacataccgacagcaaagattcattagggattccatacggtggaaactagttttttgtacttaaaccacaaagataaaatagcattatgcagcagagactttataatttttatggtaggcagactagaacttggttttaaggttagccaataattttaaaatattcattacaaaatcccactaaggataataaattggtcaggaaatacgttatgtcaaataatccaaaaagtagccccaaacaaaaactttaaatatttaatgatttacaaacatttaaaatcttcatatttatcaactacaacctcattattttttagacaactgatattcagaaacatactagacattaggattatactattccaaaatcttgatatattaatattctttttattgctcaacttatctaaaattcatgagggactccaaaatagataacaatgactaaacaaccaggagtcaaatctaaagtgagagtctcccatgtcattcttattattattccctcttatcattaccaccatggtgagttaatgtaaacacctcacctaacagtattataaaatttcaatgtaaataaacttcaagattttagtaccttaatcaagtgttataattttccaaatgagaggtttacaaatgtataaatggctttgtaatcaaatgaaaaataaatttttcactatactttagcaagtaatgaaaatatacattatgccaaagcagataatttttttagaccctgtacaataaatctaatctattatacatggctggtgagattatggatctttaaaatgaatctttggcttcttattttcctgcaactattaatttctaaatgtgttctaaatatctaccccttatgcccagattattttagctgtcacccttaggaatatattcaactttcatcacatacagacttaccgaattcgccaaattcaattttcaaaaaactactgatagtgttatattcaaccctaactgattccaaacactcatcatcattccaaaactgtaacaacattggagaaatgtgcaagcagattatattataaggttgaaagtaaaaggatatctgttgtgagtaaggagccttccatataggataaaaaagctaccaacataaaatggcaatggcatgtacaactaaaagattacaacaatgacaccacaagtttttatgacaaaataaaagggtaattctccctatatcacacatttagatgacaatttactggcaaatgatgaatattaaggagagaggatgtctcttgaatcacatggtacaaaactcagtcaaggttcaacaagattttgttcaaggagatccatattttgtgatatctcttattctctgaaccaatcagtgagaaattcagattattcccaagttagagtatgttaaaacactctaccatagaaaagaaaatcaaaactattagagagtttagctaattcaaataagaatgtcaaaatgaacacaaatctgacaacatctgcttcaggccaatgaggaaaataggataaacattcactcttaccacaatgaaaattagtcaggtcgaaatagcaatcagtgtggatatttagctcatagtaaaaatactcacaacaaagaagaaatgaaaacataccacactgacctaacttgttctacatttagtcaatcgatatttagtgcttctttgtcagaagattttgtcagagttacccataaaacttgcaatttttgtgctcttggaatggacatttaatacattaaaattgtgattctatacaaaatccctgtgtcttgaatgtactagcttaaatcacttgactggcaaatatatttctgaaaaatgcaggttttactattgattctggatttagccataattctttgtaacatccttagtagtacaatttgacaataggggatattgcaatgaaaagcaatattgaaatgcactactaggtttataaattcatatttttgagtcacactcccaaagttatcaatcctttcagtaaaaggattatttgtttctatcccagaatacaaagaaatgtgagattggtaataatatttagaagtcccttaggtctatgtactcaaaaattatgagaaaggacaagaattatagccagaagtgaaatatcttccttgtacatgatactgcaattcaagacaaatacaaggctttcacatttacaaaacaaaacaaaacaaaacaaaagaatcagtgtcttcggaagcagtatgctaattcctgctgttttccatggtctctgacccctgtagatgtcaggagcagttggccttgcctgggtcagtgtagggtcagactcagagaataccgagtacctcctgagtactggagtaaagactgagccagattgttaagaagccccactgcagacacttttattacactccttgcctctgattgaagggctgtgtacatttcaattgggcatggaaccagtaagaagagatatctcaattccatcactgggggcaactcctgatgttctcttggaaatctccatcagaactgctgatgcatttctaccacccaactaatagtgtgctgccacagaagcagcgaaattgaaagtaaaacatgaaaagccataattttaccggtcaaaactccaattatcaaaaggaagaaatacgacctggtggaaggtagggggagctaatatgtcactttccttgggccaacatcctggctgttaatatgaaagccctcgatactgcctgtgctgcatgattgtgaatctggactaggaaatgctgattgttactagcattttctgatatgccttgtcagatttcacaagaacaattctaaatacttcaattcaagcttttctccaatatattaaattactgccttaatgaaatgcttccattgtaagtggaaattttcactgacagccctcctctgctggtacacaaacaatctctgcctttgctgattctcccgggctctgactcctgtgcaagtcaggagcagtctgccttctctgggtcagtgtacagtcgggctcggcttgtacccaggatctactgagtcctggagtatagccgagcccgactggtaagaagcctcacagtggacacttttattaccactccttgcctctgattgaaggactgtgtacatttaaatggggcagggagccaataagaagagggatttcaacgccagcagtgggggcacatccggatgttctcttggagatgtccatcagaactgctgattcatttctccctctcagctaaacgtgtgctgccagagaagcagcaaaattgaaagcgcgacacaaaaaacatcttttacactagacaaatgtataattcttaaattgaaaaatataagactggtggctggtagggggtgctcaaatattaggttacttgaggcttaaccctgggtatctacatgcaagcccccgattctgcctggagctgcatgattgtgaatctgagctactaagtgttgctaattgctgacattttctgatattcccactcaaatgtgtgtcgcggccaaatcagtaaaactgaaagtggatgataggaataaatgtaacataccctgggctctggccccagctatcaacaagaaaaaaaaaaagaaaagaaaaataatactctcctgtggcaagtacggacaagcttacatattacaagcttaatgcaggctttgagatactattctgtgatgtgaattgtcttcatgaagccccaccctaaagcctcaatgttcataattgaaaacgagacagaactattctctctctctctctctctctctctctctctctctctctctctctctctctctgtctcaagacagagagagagagagagggagggagtcccctatcaaactttcattctatgtagttagttggaatgatgttactgagtaccagatgtatttatattctacggtaacacaattaaggagaatcttcaatgagatattcttataattgtgttggctaatataaacatgtttgaatattgtctctgagactctaaagggagactatgggaaattaagtgggcaacaagtaaatcaaataactgattactgagagagttatttcttaagcctcttcatgttataagagtaacagttgttacaatacctctccaattacattctcagtgcatttcaattccttacacacacacacacacacacacacacacacacacacacacacacggctgattctttgtatgtttacatgaacttgtgtatgtatctttgaactatttgtgatttcatacaagggcatggtatttgtattattttacacttctttttgtttcctactgccacccaagtctgttcttttaaatgtcaaattttataccttttcttattaaaattattttatccttcatgagcaaatacatacctaactaacccacactgagtacctaatcttcctaatctaatgataatgaataaccatatttagcattgacattcagaaaggaaaggtctatcaatgtcattttacattatacatgggtcctttttttcctagcacacatagtttgtcagttaaatatgggaagttggatgaacattatgtctgtgttggaatgacaatgtttggagtgattgtgctaaacttttctttttcagtttgtttgttgtaggggtctctgaccatgcttgtgagggcgtggtcagagtgaagtagtgtgactgcatttgctctttcactttcactttgcttcttgctgtacagactgctaccatgccggctggctaggtcactctgtaagtaaggcttttccctattaaatacccttatatctctacctgactccatattggtaatttcccacaatagtttgttttgtttgatttttgttttggctctacaagtcatcaaaattctctcctttgaaacttcctactcatctttcttgaaactctggtaccaacacatataattttacatagaacagaacaatgttttcattcacaatagtttctaagtctacgaatagtttaaagttgtgtttttgatcagttgtggttggacacccaattgtaatccttagccaattgagcagttgcagaaatgtgtaaaatgatgcatttttttctgaaattaacagttaccattgtcttcgggtataaagataattattgataacacatctagaaatcctatggcttggggaaatttgcagagaaatagtctgcttctgagctcataagcataatttgtcttcctttatattatgtcttctttagtctagaaagctagagtaaaaatttcacacatgtctttaggatccaagacactaataccctataaatgcctatctgatggcaaattatgacttgtggagatattgctaaattgatataatttacagataaaatattttagttctcttagctgaactttttacaagaaaacagcgtaagtgacatgtgtacaattaattatatatattagccaatatattagtggcttaggagacagtatctaagaccttaatagtgtaagacatggttaaaagaatcctattttcaaaaagaaggaaaagggaatataatggttcaagattcacaggttttagatgggtgagagtactactcaacattgctcttatttcatatatatggggattacttaagtacagcagatacaattgattggtcttaaaactttaactcaggaggtagacaacaaaattctgaagtttttacactatacagccacttaaatgaccatatcagcaccctaagtgcttggaaatatgaacaaattgcacttttcattagaaatcacatattagaaatcagtcatacaagcattgccatccaatcccagaacatgaggccaaggtattgacagcaagaaatttgaggtttttttggccagtttggataacataattggcaaattccaaacctgtgagctacagtatgttaacggaattgctaatatacatgtgcttgtaactagaatgtgctgggtttttcagtaagcttatgctcctgaattcccatcagcttagaatgcctgcctaattctttacctctaatacctagggaacataggtatttctgtggaagaatcttgaagccaaaatattgtcagattgatttattttaaacagtttgttaaaaagctcaagttttcctctggcattttagctatgatgttgcaagtttgctagtagttggccccctatccatgctttacctgaatgtgtatgttacaaataaagagagtaagttgaggaaataatgaatgagtagtaactagataagaattctccttaaggatttccccaagtccagtcaacaaagagaggaaagacaatatggatcaaaggggtcaagaccattttggtgataaccaaagaggaggctgacctcagcaagtcagagttcactgattccagactgacagctgggggacctgcatggcaccaagctgggctctctgaatgtgggtgatgattgtgtggtttgggcagtcagtgaggccactgccagtgagaccaagatttatccctaatccttaaactgggtctatagagcccattcttttggcaggatactttcctcagctgagatatagggggcagagtattggtgttgccaccaaaagatgttccagaattctttaaaaccattggaaactttacactctcttagggatggatgggtggattgtgggaagttttggacagcagaaggagaccagagagtgtgaacagggattggtctataaaatgagaatagattgctttaaaataaaaaaaaatatttcagaaaacattttaggtaaggaaatatagttaatactttcaaaatttcaatatcgcatattaatactgaacagagtatttcaaaattgtgattggcactgagaatacaaaatgaatgtccaaagtattcagatgtgtgaggaacaaaccatacataaaatcatctaaaattttgaaaatgtcatagtatacatatattacgaataactttcctaaatgcaacaccttagatcacttcatgatcatctttacaagttagatatggcatgcacactgaggtattcagagcagcacataaaagtaaaaatcccatgtagtatttcaggcactttcctatacatataggagaaaactaaaattcaaccttttaaagattccactttgggaatctgactttatatactagaaaagttaagcaaccaagcagcatttggaagcccaaatcacaattatcataccccaagcagaaatgaagactctatgtagatagccaggcacaatacacaagttggtagatatgtaagcttggccgtacttgccacaggagagtattatttttcttttctttttttttcctgttgatagctggggccagagcccagggtatgttacatttattcctatcatccactttcagttttactgcttttgccacaacacacatttgagtgggaatatcagaaaatgtcagcaattagcaacacttggcagcaacactggggagcagaaaggatatataacaggtagagttttagttggtgggtgctagggaaggagtttagggagtgggaacttgaattgacatgtaaaacaatcttttttctaattcaaattaaaaaatataaagtagaaaaacaagaccagaagacgtggtccctaatgttgagaaatttataatctagcagctaaggtataattaatgaaaaacagaaggccatatataccccagcatttgacagcattattcatttgtttcatgggtacatttagccattaagtggattcttctctgttcctccccttgatctttcacatttggcttaaattttctatcagaagagaacaacaaagaaacacagtcaacagaaatctaggactgccagcaatcctggtctttccattattagagactgtggggaaaatgccatctcaatttgcctgagaggaaagttatattctttcctataatgggtatcttcataattaatgagatgggcagttgtgttctggagctttccacaagcacacatgttaaaggaaggcatcgtaagaatgcttttgcactgagggctggagctgcctttcttccttcagttttatcttatttctgttgggtgcatgtaatgatgcacccagctgatgacactgtttggtactggctgcctgctctggtgacatccccccatttaatgacaccaggctctctgggaatgatggggttatgtctgatggaaacagtttccagtgatttaatggatctccttgatcaggtcacaagtcatgaatagtgacatcttatgggggaaattttttaaaatgggtaaatttcaggcacaccctgaggacacattgcagaaagtctgctacacaatagaaaggtttgctaacactgagtatcaacatttagtattttgggtgtcagcttacaccctgttctgtttgcaagctgaacataggcagaattctctcctgctgactctccttaacagtgtatactggaaatttcaaagatcattctattttactggaaatagtgtggctttgggtgactggaaatgagaagaggtagctgaggtcctcagcatgaaaaggggcatgcagaagtgaagagactcactgtctcttgaagcaagcttgacttccatgatccccaggactgggtctggctttgcattttgtataagagaagggtcaactgagctgaacctagtgtagttcatgaatcctatgtattctgtctaattaccatggagagatgtaagaagtaaaacatgtaatgtagttttatatttaataattcagttttgccaatgtctagacatattacatagaaattacttattaggaagtagaaggaaatgtgcaagagattttatgggctatttctacaaatcagctgtttgaagtttcatttgacacaaaaaatacagtattattcctctttcacaatgacaaatgtgtgatttggataaggataaggaaatgtgcccacagttctcccaagtagtcagtgtgcacttggtggccagggccagttgtatggaagtatttcctttttccaatctccagatgcttcttagggttttagcaaatgttgattaaaaaatgttagaaatgaaatcatgcctgttaaatattggcaattttaaaaaagctttgggttgtggttatctgtgactggaatgacaacagaatgttttgcaagaggagaggggagggaaagggagattgggagagagtagggccaagagtgaggaggagggggagaatgagaaggaggagggagagagagaatggtgattattatgtccaagtcactgaatttattggaggtgtcattttcttttgcatgacaaaatggagatggcaataaactttttgcaagaaagagagcagagtttcaaaaggaagagaggaggaggctggcgtgagaggaggggagggttgggaagggcagaggtagggagcagaagggaaggagggagaaagggagaatggtgattattatgatcaagtccccgaatttatttggaggagtcattttctttttcataacaaaatgcagatggcagtaactacccatacatccaaaagtgagattctaacaacacatacagatgtaaattactggttaatgtgatagaagaaacaatacaaagaaaagaaaggagggctgggtacatggctctgtgttagagtactagcccagcatgttcaaggtcctgggttcaatccctagcaccataaaagaaagatggaaagaaagaaaagagaaaggattatgaaagggacaggaagagaagtgaaaacaaggaaatggaggggaggaaggaagaagaaagagtaggaagttaacaaaacagcaagaataaaattgagaaaagaccaacagaagcaaggggaagtttctggcactggagccttgtaagaggtacagagtgtgctcagcaatagatgtcaatgtttttaagggaatttgaatggctcaaaagaaagcatggctgccatgactgttttgacagcttctcatctcctctgatgtttacttacattacctctattaggggcattccattttattagtctgcatttctgctgtctggtttccaatgaactcaaagagcaatcacagtctcagtttatactatgcataggctcttcaagcaatgattctaatgaaatgactgctttgtgaaaaattattttctcaaagtgttttacttcaaaagagtctgaatgttaaagctctctaaaaagacaagtctctcactatctgtctatggaggatggcgttagctgttgtttggcagcttttcaggttttaactaccttctgagagctttaaaagactctggaaacaatgatagtagcttccttctttatgtgataaatccaccattgggaggaagggtcaagaacaaaccatcaataactgaaaaactcataattagtaatgttcaggttatgattcatacaattcatagttaatattcaacgatgattaaatataagtcactattccactcacagcagtatcttcaacttggaaattaataattgcagtacagtaactatgcaatgaggatttcctggaggtagtgtgtaagtcagctgattgtagcggccttctgtccctgcacatgaggactgaatactgctgttttactgtccccttcctcagacaacttctgctcattttctggtcaatattctggagaatgtgggcccctatcagtaagcaaaggggtgtggaaatgacaatgttgaccattggtgtgggctaccttaaccttggagggctctagaagaccaggtaaaaataatttattacagcctggcagtaggaacacgatacaaacctggtacatgagctagcttgttggagcccattccctatggtgggataacatgttcagccttaatgcatgggagaggggcttggccttgccccaacctatagttccagcaggactttgttgactcctcatgacagcccttacatgtgaggaggagtggactgggagttggctgggaaaggtgaagggggaaggaggagtggtgagagggagaattgtggttggaatataaaatgaaattttaaaaattataaaaactaaatcattgtattcatatgtgaatatttcaaagaacaaataaaatacttccaaaaattaattcattacagcatcagacagacagttagtaagtaattcttcatgaccatccactaaacatgggtgttagcactgtgttagcatgcttttaggtcttaagggaagaataatacatttttttggctcaatgagtcatagttttcacaaccctttccaggcttgattctagttgtgaattcttcatgctttcaaagttccaagggtctttggctaagcttttataatgtgattccttcaaaacatatttaactgttgttttaattctactagcagctaacaacaggggtgttccgggagttgtgtatgtacagtggattttaaagtagctgtttactccatcaccccaacacactgacattgggttaagacaaggggacatacagagtgttagcctcgcacagacacacagacagtgatataagtaatgaatgtgagttttattatgtgccataaaatgaatattgattcctacttacaaagacagactgtccacacactgacactgatctactctgtaaactaaatacaagtagacagaggacacctgacttaggctaatggcttatggacagcctggaatgaaagtgctgttctctgatttggagagcttcttgacaatattacataactaaaaactataaaaggacaatgaaaaaaaaagtatattcctatgtttctaataaagtaaaaatgtagaaaatagatgtgttaatccaatatcaagtgaatagatgtgaaagcatatacatacaataaacatacaagcaacattatacagagtacgtatgctgtatttatatatttaggaatatatgtatctctgtatcaataatttaagaaacagagaccatgaatttgagagagagcaagaggggatgcatgttggagggaaaaatgaaaaggtaaaatgatgtaatcatattttaatttaaaactatttgaaaaaagaagtagttgcaaagaaggtccaaagagacagctcagcaggtgaaatgcttcctacacatgcatgacaatgtgagctcaatcattgaaatccaagtatttctataccaaaaaatggtgccacaatctgtaatttcagtgctggaaaggcagacacaagaggatccctggagcttgatagccagccagtggagactaaatgttgagttccaagctaatgagacaccctgtctcagaaaaagtggactgggctggagggatgacatcatagttgaactatgcattctacatatgtgcacatgcactatacatgcatgtgtacacacaaaagtagttacaaatatgaatgtcacttgtccttgatatttataaactaaggagaaattatggactaatttgctgcacatctaatcaaaagacaaagaatgtggaagaagaaagccctcagatatttatttgtttgtttatttatttatttattttgccacaccccgtacagacacagaggagccaaactctggcctcttggaagctgcctgccctaccgtcttgaactgatgaaatatttttctttgaaagacttattttgtcctgcccagtcttcaatgagtgcctttagtttccagaagcacagcccagcagtttattgttgttgcttaacataggaaatgatatcatattgcatttcactagtatttggcccctagtaggttaagaacagttattagcctgactcagaaaccctcatgggaactcatgaaagaagcagaattcaggcggcaagcatcatgtgtcttcatcatttcaatggtttttcacagtgactggaatgtaggaggagactggatctcagtgcttgtactcacacataatagatacaatgtgtaaaatgtaaactagcattcaccttttacaaatggtagcacaagagttttactgaatgagtcttacaaaccattaagtagaacaaaagtaggaatctcctgtcttttcaggcttgaggtcactaagaatttttttttaattcttttgtagcaaagcaagctgacaaaaacaataaatctgttaaaatagggaaacagcttagccagtcaacagctattttagatcatccaaagagatgcacagccaatgccccatctccatgttctctggcaaaagcagcagaatgcctagattctgaactataagagcattgccacagtggagcctgcttcagtgagcttctactttgtcatttgtctatgcaatgttgttgactaggagtgtgtttttaaaaatcaattaataaaatgaattaatcaataaaaaagagaagcagaaacatcagaagtgggatgatgctgtttcctgcccaggaaacaggatcagtgactgggagctctaatgctggaaatcaaacaatccctgactttgctgattccctcaggccctgactcatagatgtcagcagcagtctgccttgtctctatcagtatgcagttggttctggtcatacctaggatatactgagtcctaagtatggccagaacctaactggtaagaagcctcactgatgttgcttttattagcacttcttgcccctgattgaaggactgtgtgcattcaaatggagaatggaatggaacgagtgaggagagtgttctcattcccagcactgaaggcaaatcgtgtggtgccttgggagatctgcatcagagctactgattcacttctccctccctccctaaaatgggctgcagctgaatcagtgaaagtgaaagtagatgaaagaggaaaagtgcaatttaccctggattctgatgccaattttcaaaaggaaagacaccaatctgtgactagcaagggttgatcatatatctgcctgtttcagtaagcataattgctatctacatgaaatgtctgtttctccctggatatagctgagtgtttctagccatccagtagcttcttgggactgaaatttttgatgttccatgtgagattgcccaaatataatgtaaaatgattgaatttgagttttctcctttatatgtacatgggtatctgaaataacatgcttccattgtaagtggaaattttcactgcaagccttcctgtgctgggaatcaaacaatccctgcctttattgattgccaatggttctgtttcctgtaaatgtcaagtgcagtctgccatgtttgggtcattatactttcggggtcaggttatactaggatctactgagccgactggtaagaagcctcactgtggacacttttattagcactcattgactctgactgaagggctgtgtacatttaaattcgtatggagccaagaagaagagagaactcaatgcctgggaaatcataatgttctcatggagatctccatgggaactgctgcttcatttctccctacaacctaaatttgtgattccagggaagcagcgatagtgaaagcacagcatgaaaaaacataatttgcaccggacaaaactccaataatcaaaaggaagaaataggaactggcgtcaggtaggggacgctgatgaatcaggatgcttgcggctacatcatagctactaccggaaagcccccaactctgcctggagctgcttgattatgaatctggctgccaagagctgcttgttgctgacatttcctgttattccctgcttgttttactaagagcaatgctaaaagcgtcaatattagctcctctccaatatacatacataagttactgaaatgaaatgcttacagtataagtggaaattttcacttctatctctgtagtgcccagaatcaaaaaaaaaaaaaaatcccagcctttgtttattcccacagactctgtctcctgtagatgtcagcagcagtctgccttgtgtgggtcagtgtgtattcagcctctggctataccttggatccactgagtcctggaatatagccagagcctgactggtaaatacctgcactggtgatgcttttattagcactccttgctcctgattgaaggactgtgggtactcaaattaagcaaggaacaagagccaaaaggagagtgatctcttttcaagcaatggaggtaaatcctgaagttgtcttggacatctccttcgaaggtgctaactcatttctctctcccacctgaatgtgtatgacagctgaaacatctaaactgaaaatggatgacagggaaaaatataaattacctgggctctgactccagctgtcaaaggattaaaccaacctgtgcaaagtaggctgttaccatatattcatgtctttgtacctacattcagactagctccataatattaatctcttcttccctggactgtgtgattgttactgggctgtcaattgctgcttggtgctaatatttcctgattaatcatttcaacttcccaagtaccatgtagaatgattgaaatttatctttcatctattttatatgtgctcaagtaactgaatgagatactgaaataatatatggaattagtactttaaaggcctgctcttaaaataccaaatatgcatgctgtatccaacagtgtccaggaagatgaagcaataatttgtaccattgttgtacaaagaaatattcatgatatacttacattttcaataatgttaattaatttatatgactttatttatatttcatctcaaaaatactttatattaatttttcacagtgccaaattattcatgtaatttattaatatttgaatattataattttcaaaagtcacttcctttgcttcactacaattcctctccaatcaataatccatcggccagtttactcaagagatcccaattttacccttctgtgggtgatctctgcatccctcttcaggttgtcattgttactcaaattctctgggactatggattgcttgaaaacattgctgtataactagtatccacttacaagtgagtgtatattatgtttgtctttctcgttgtaggtttcctcactcagaatgaatttttcaagttccatctggttgaatgaaatttcatagaatgttgcaattttgagaatattcagtaccttaacttcatagaactagcattcaggaagaaatctgccttgcttcattcttcagctgattaaataatataagccaatgtgataatctaatgttttgcagatttaaccatgggataaatacacattcccttgtgctgatatattaattttcatctattaaagctcccctgaagattcagaaggcaaagtaaacttcaagctatagagatcagtcattggtggtgcacacctttaattgcagcctcaggagatatattccatgatttatagtgaaacaattatgcacacaaacacaactgttaggaattcaatgggtataatagcaaggtccaattgacatactgtttgtcacaggtaaggaatttgtcaataataacaggcaagccaactcagaaatcttactgtcaatatgtatgcctcatgacttatgatttggtgctgtgcatgtatgtctgattttgaatacgtttattctaataataggtgccatttctttatatatatatatatatacatatatatatgtgtgtgtgtgtgtgtgtgtgtgtgtgtgtaatcaggtagctgatattgccatataagcaactgtctataacataaaaagaaaagcaaggagtcacatgggcacaataataagagaccccacagttctcccttttatataaccatctattctactgcttccttatctctgatgctattctcttcatttccccactttcagccttttggtgcttcctggattaaaaccttaagatcaaacatgattggcgtctatacttttacaatccccacatataaagaataagagctatgctgagtactgtcccatatataaaatctctgcctcctaatattatatgttctctttccattttttttaaaataaggtcactttaacattttcctacactatgaaagacttagatactgtaccctaagccattaataaacataataattctactcatatcactgctgctttgttaatgtgaaaaaaaaaacagctaacagacaacaaaacctcttgataaacttaatgaaattaccaagttatccaaatcttatagtttaccaacacatagcccttagtagtttattggtaacttggttgcaaaagaaatgtttgaagttcattctagtttgcttgactaaagaagacatatatcatacatgctcaatgttagaacctagtcagctattcatggctagagagtccatggacccaaatgcaaagcattcatctgaaacttcctgaagccataggatttctagctgggttatcaatttttcccttatatcctcagacaaaattgactgtaactttcagtaaaaatcaacattttacaaaatttcataactgctcagttttgtaagacttataatattttgtcctagcacacctgatttatatgcaaaattctctattttaactaaaccaagaaaatattacatgcaatgggcagattaaatttatgattctaaggaagaatatctgttgggaccaagtcacagaatcacagtgaaatgtgttaaaagaaacacagggaattttaaagcagggaagtttgaatttttaaaaaccaaaacccaaaaattagcaaccaaaaacagacagacaaagtgtttagcacaatcccagcataaattgtcatgaaaacacaaatgtaaactctctcaacttttcacagctaccagaagagttacagacaattaatgaacactgagacagaatgttccaatttctactgtacaataaaattgatagttttctccattaaacatgtagatgctaaaatctgttactctttaccactaccttaaggacattgtgtgggtaagttatgtatacaattatgcatgtaggataaaatactttttaaatgaagtagtatttatattgacatgaagtaaagcagacatggcattatagaaggaaccagaaagatgtggtaaataagaaaaataatgtgctcagaatgacttcttgttgggcccaagaggggagccaacctccagagacacaccccactgagtcactcacaggatgcatgttcgatgcaaaagcaaaaggattttattctaaagcattggggtctttctgtgagaagagatcgaccccgagtttccaaaacaagcattttttatatttttttcatcactaggcaggagtatgacaacatattgtttggctacaacatacatgagtgatttactggttggttgggaactgaacttacaattttgcacatgaggggttggaatgttattttgctttttacacctgcaaggccatgggacacctagtggtttttccgggaacagagtgacttattttcaaaacttgggtgggaatgactctctggagcagggtaacccataagaatttttagaaaccaaacagctgttgaggctaataacattccttggaaactagtcataataagaatttccagagacaggtcatcatgaccgacatcatgggttctttttcccagagctgtatgtgtggccagagtgactttcaaatacatgctggtgggtatcaggctgggtttgagttggggtctttcattctcagataggacaaagatgcaaacacctgcatatacatacatatataagcacattaaaacaaatatatatatatatatatatatatatatatatatatatatatgggcatatacatatatacacataagaaagtatttgacaagcactgagaaaataattggagaagtgtgtttaataactgcatgaattataccttgaaggaatagaagagatagctccctttgttaccagagttattttgaacaattcgcggctaagatccctatagacccccccattaaagcctcaaagagcatttccaaaccattgttattctcctaacatgatgataagaaactatttctgatatatctccttacttatgttatcatagaacagtaatgatctggtccctggttagaaacttcaatgaatctgattacatgctgtaagcagaaaatagtgatctgtcttcagacatattctttacatagttgcttaaacatcatgggagtaatcaactactcttttaggtttacagttaacaccatcagattgaagaaatgtccaccagtgctaaaatgtccaattaaatgagattggaatagtcacagtcttatgcaaaatctattttgctcattttactagagtattcaagagagaaactgaatcataatgacttactgatgtagtgatagatttgtaaacaactggccaactaagactcaattcttaatgcattagatggaaaatgcaccaatgatgtgcagagaggcttattctatagtacctgacaggctttagggtattatgttatgatgtaacttgttatcatgaagccttttgtttatgcctcaatgttctctatattgagaaggaggatgaaatattctaacatgttcacagttgtaaaataattccttagcaaaaatttcgggactcccatttacaatcggatatgagaattcagagactgctatggcagacacagaaataaaaaatgcagaaacatgagtactaagaaaaaaaatacctaagctgttaattactttcaagggaagcatgttataatagtccatcaacatcagtagtgaaactctttccaataatgctcatacttgtctgatgccatagaaattaatatgctgataagaaaaaaagaataaagtactagaatttgtatatgttaatgcaaaggaaatgcaaatgcatttcagagacccatcaatctcctgaaaatgaagacacaatgttaggaatcgaacccctggttaactgaaaccttatcagcctgcaagccagtatttatgttccaacaaacttaaatgttcccaccttcaattctttataaggaacatcagaatcattttcttagccagatcctgcagattgcaggatgctgacactaagggccaacttgcttcactctctagtcagaatgctacaactccatagcagaggaaacaacattttcctagtatgataatcctttttaagttgttagtgagttgttgtcataaaaccacatgtaaatagtttatgctatttttggaaacaatttaaacttactccaagattgtggagaatttgtgctgaaattgtaaacctaggcaaggactcatgcctgcagaaatcatggactcttgaatacaagttaactctaccaattttcagtaacagtataattccatgtatataggcaaaattcgaaagggacctatatttaagatactcttctggtataataaggtaatatgtaagtaaccaagtaatttttattccttttaagggacattccatgagatggaacctatacataatactgctaaagtagccaaacacctgagtttatatattttatgtttatataaaaaacctgcttctattttcatgctattggatgaatgaaataaaattattcctactaaatactgttaaactcataaatcagttaattacttaatcctcatcagggatgcttcttcatgcagtagatggtaaataacctggagattttcaattagtctaagggtagactgtgagtaactttgcaggactaggttgtaaatggggtagctataccaatcttcccctctaaagtctcatgtatctgtgtggaagaggatgcagatagattgtcagagccagaaatagaagaactcaaaggataacagttttgctttcataccagaactaacacacataggaccacacagagaatactgcagcagacaaaaaactcctcacaggcttacaccagacaaaattttagctatgaaatggaaagtagacataaactacaacctctaacaaggcataatttgtaactgatatgtgctaggaaaaatagatttattccaaaaggatgtcactggttatatattaaccactcatccatataggcctctgccatagaattaatttgtcatttgtcatagtcattaatatgtcataatcaaacagactacatttttttcatggtttatttctgcattttattttcagtatatatgtgtgtgtatattttatatgtctttatgtgtgtatatataaaccattaaatatatacatatatatgcatatatatttatttataatcaacttattgtatttatttgtattgtgttatttttacttatttcttgctttgctattttttggggtgtaaggaaaggaaagagaattagggcagaaagagagtgagaaagattgctacaatttaatagtgagaaagattgttatcatttaagagtatgtaaatataggtttttagggaggtgaggagaatcccaaatacatgaggagaaggaagaatgtgatcacaaaatattgaaaaaaaatttaaatagctaatttaaaactatgaacaaaataacaaaaacaaacaattcagtatatagtattatttaatagaagtagcaagcataagccacttaaatgtttatgcttatattaaatttcataaagagtttatagttgtactacattaataaccaaaatattaaaacttatatgatcatttcaaagtacagagaaatgtattttagaaataaaatgaaccatcatgattcaaaaaataactctcaattattacttaaagagatggtattgggaaaaaaactaaaaatatctaatgtgcagatactaaattaaacagtatatctgcaattttaaagataatccaacagtattttgtattggcacttacattggacacattcaaagcaacgattgtacaggatatgaatcctgatcaatatatatcttaaatatgtgatgcttaacttaaaggaggtaatttctaagtattatgaagacataaaattatgtatagaaaaatcacaagttataaatatatggttactttgaaacagatgtcttcaaatttgtagtaaatgagcaaatataatatttaaattgatttttattaggcaatgtaaataaaagttgtaagtgaaaatgggaggtgatttttggaataacatctgcagcaggtggtggtgcgtatctctggtatctctgtgtcccttatgatgctgagaggaattacagcttcatagatgagtttgagatcctggtggttagcaaatggagacagtgaatcagaaatatatgacttatattaaaagaacaaaatttaactacacagtatgggttaggtaggtatgcatttgtacatgtaggataaaataatttaatatgaaaaggtataaattttgatctttagaagagcagacttgtattgcagcaggaaacagaaagaagtgtaaaataatacaaatagcatactcttgtatgaaatcacaagtaggtcaaggatgcatacacaagttcatgtaaatatacaaacacagaatcagccagatatatatatatatatatatatatatatatatatatatatatatatattgaaatgtactgaggatatatttggagagatatattttgagagatattgtaacaactgcacttcttataacatgaaggggcaaaagatatatctcccttagtttccagagttatttgatttactttttgggtactgccattcttatcgtctcactttagatcccagagacaatattcaaacatgggtatactagccaacacaattataataacatattattgaagatcctccttaattctgttactatataacaaaaatagatctggtactcagttagaaaattctctccaaataactacattagatgaaaatttgatagggaatgtccttctgtatatatgtttctcttattggtcaacaaataaaacactgattggcccaaagccaggcaggaagcatagacaggtctagcagacctggagaaggctagaaagagaggaaggtatagaatggcctccatcagacaccatgctgctgaaggagtcaacatgccagataatgggtaagccacagccttgtgataatgcatatattggtagaaatgggttaataattaaggcagagataaccaagaaggagcacaagccaatggccacacattttatatttaattgaagtctttctatgtttatttgggaaaagcagctgtggaacttggcaagacagaaactttcatcttcaaattttcaggatgaacaaaaattctcactcttttttagctacattccctaaagcagaacatagtgggcagtgttcaggcatattgctggaagagtggcttaaacttcaagggattatcaactgcttttaacaattatgattaacatcactggattgaagaaatatcccacactgttaaaatgtccaagaacctgagactagaatggtcacagaattgtgcaaaacccatttctttcattaagcttcagataaactaactcttaatgatatattgatgtacccatagatctggtcatgtatcaatgtcccatagtcagaaatgtttctacattcactatatgggaaataaaacatagtggttgagttgggctcttttataatgcagcttttggggtaataatttgtgatgttacttctcttcatgaacctcatgctaaagccacaacgatcaaaattgagaaggagacagctaaacactgaactgaactcctggtacccagttgcagagagtgaggtgtgatgagcaaaggggatacaacctggatattgaaaccacagaaacagatgaccagaaaaagggggagctcatggaccccaaactgatggctgagagtccagcatgggactgatacagaaccccatgaatgtgaatgtcagtaaggaagcctcagcaatcgatgggacctcaggtagtaagtagatcagtacttatccctggcatatgaatttgggactggataccacctggagagatgctctcctaaccgggacacattggggaggtcccggaccctggccagaatgatttggcagactttggcgatccaaaatagatagcctcaccttctctgggagggtggggggttgggaagggggttagggggttggtagttttttatgataaatctttctgccaaaagctgcctgagcaacaccgccatgtgtgagctttatgccagccatctgcctgagttagggcccaaatgaatacacagaaacttgtattaggtacaatgctgtttagccaatgactaggattctcatctgttagctcagtcttaaatatcataaacctatatattttagaagacttatgttatcagacgctttattggcgactctccttgcaggtggatcacattgtgccgctggagcaggagcagagtggaaaagggacacttcctgtttcttcttcacttaaatatgagtctcattgctatgccacttcctgcctggatcaccacttctctactacatttcccagaatcctctttgactcctagtcccgtctaacttgctgtttcattggccaaacagaactctattaaaaaatcaataagataacatacacagaagtacttcccccatcatctcctcttttctatctaaataaaaagaagggtaacttatcttttataataactgaagaaaactataaccataactatctgtctttaactctatcaaagaccatagaagggtgacaataaactctagaattgacagagacatctccctacctggacagtcacccaagttcctctgtaacgttggggagaggatggaacttgaattgtcatgtgaatcagggttgtttctaatttaaattttaaaaaaatgtaaaggagccggaactattctaagaaattcagaggtggtggatgaaatcatagtaactacaatttccattctcaagtttattgcagacctaggaatttagaatctaatatagcaggcacaagatctgcagggaatctcaacatacaaaactgcaagaaccaagaatcaagtaatctggtatgttaataaatttcaagggaaatatgtaatactaatctatgaccatcagtaaataattaatttccaatcaagcaaacaatgctgatgtcatagtcctgaactggatgacaagaaagtagaggttgcagatgtcaaaatttatatatacatatatacattggaaagttgaacctgtgaccataagtggcaagaagatgataacaagaaaattttccatagtacattttaaggtctaccaagtgcttcagtgataggtagtgtagcatctgtaaatgttactgcttcataatttcacagactttagggttgctaggaaaagtgacaatggcatagcaattcccacagtgatcttccaggggaaaaaataaccagactcccctagtgcatgaagcacactaaagtctaaactggattatctgtcttgcagatgatacaagacttcaaaactgagacagggacacggtatcttaaactagaagcagtgtcatcagaagcagattgctatttcctgcacaggattcagcatcagtgactggaagctgccctgaagcaaaaaatccctgcctttgctgtttcccacaggccctgactcttacagatgtcaggagcagtcttccttgtctgtgtagagtaaagtcggttctgatcctacccagaatctactgaatcctgaagtatggccagagcctgactgctaagaagcatcacttttgttgcttttgttagcacaccttgcctctgattgaagaactgtgtgcattcaaatggaacatggaatgggaatgaatatgtaaagtgatctcaactccagcactggaggcagatactgtggttccccaggagactgcatcagagcttctgattcctttgtctctcccaccttaaagtgtgctgcaggagaagcagtgaaagtgaaagtagatgaaagataaaaagtgaaatataccatggtttctgacaccaattttcaaaaggaaagaaagaaacctgtggcaagaaacagttgatcatatatctgtctgcttcaccaagcatttttgataactctatgaaagctacatttctccctggagatagtggattgtgtctcaagctggacaatagcttcttgtttctgacactttttaatatgccatgtcagattgcccaaatgcaatttaaaattcttgaattttagttttctcctttatatgtatatgtatatgtatatgtgtgcctgaaataacatgtttctatttaagttgaaatattagttttaagaagtactttgaaattcctgtatttgattactatatcttaacagtggcatgatgatgaagaaataatatgatatatatatatatatatatatatatattcttaacatatatatatatatatatatatatatatatatatatatatatattcttaacaattcccggttcattgtttccttcaattgtggttggttccactcatgtcttcatgtatggtatcaaagtacaagttcatactcaggaaatactctgtccagagataatatgtgaatattgaaattttgacagaatcactatactcccttgacaataattcctctaataattaccccatccaatgttcatatccttaaagcacctgagtgtccttggattggggatctccaatagtacttggggagactctaagggattgaaggcctgtggaaatctgtctttcctcttcaatcatctgattaaatgatataagccacactgatagtattttgattcatgattcttccaccagatatatttgaatgtttcctggatataatagtgaaggattaattccatgcatgtgaagctgatgtcatttccagtgtacaattgtaaactaaaaccaatcacacatttcttgcatgtagaggtatattaccaatgtcacattaaaatactatttctcacaggtattgaatttgccaataatactatgcaatctggcctgtaaatctcagatatctttgtgatagtgcctctgaacagccaatttcttcttgctgccaacaatttatgatatgacatatcagattctctaattgcaatgattaaatgcttgataataggatttttcatacatgtgtactttaaacaatcacacttaatttatctatgattttatatgtagatccatagatgtcttcatgcaagccattgtttttgtttgaagcaggttattcagaacagatgtatgggtaaccccaccaaatcctgccttcccttgattttcaatttttatatttcctgcaggtcacacagacactctttgcattgtaaagacaatttgatcttatgaggcattttaactttaaagacattctgcttcaagaaatatctctcaaggcaattaaatctcaatgttaatctagaaatacaggggtcatcagttttttcttcagtctctgctcagagcagtctaccaactccagtgacccagtcaacacacatatatttcctcatacctgtttttttattcagacgtcacttttcaatatctatatttctgctgcctattatttcaacagctaaagtactcagggtaaagtactgagctaaagtactgagagtatgcctgtggaaaatcagtctgctcttattaaggaagaggaatacagagatagaaggaagcctactgatacattcctgtataactagacatgtacatcacttgatcctcatctgagaagcttctacttgcacttcataatgaataacactgagaggctcaggtgggttatgcatagaaaaaaatgacactttggtgcattaggagctaaacgctatgttccgcaaaacccatccattgaagactatattgaaaaggaatcagagagattgcaacgaggccagaagcagtgggtaactccaacaaacaatgacttttgttttattgttgtattagaatctgagtctctgtttataaatactgaattttagcatatcactacataatgttgataatatgaatgaatcattgtgttgcattgaaactagacacttgctctgttcacgagtaaattctaagatgtttcctgtggcccacagaatcttttaaggtagctatatatgctgttgtagacagactgatcctcagacagctttaataagtcagggatgtagttcatccaccaagggtctgctgagatcttttcctatgacagcaacttgatgtgtgactactttaaaactatgagatattccattttaatttttttacatttttgtgaaaccagtggtgtagaacatttaccatgcaggaaagatgtatttgatgagtagaaatgtttatttcagatatccctcaatctcctgaaaatgaagacacaatgtaaggaatagagcccctggtcaattgaaaccttatcttactgcaagcaagtgtttaacttcaaacaagcctaaatgttcccagagttaattctttataggaaactgcagaatcactctctcttccagatccagcagatgtcaggatgctgccactaagggccaacttgcttcattaaatcttcagaatgctgcaactaactaggagaggaaatagtattttactagtatcaggacagtcctcattttctggcaggaatctgcctaaacctgtcatcagcttgaaaacacaagttgtaggacatatccttggatatgtggaaaaaaatttgcttagagaattttacatcttattggcaagctgaaatatttttaaacagaaaatatattcttctcttatacaattttccctatctctgtttctcccagcaactcatcagctaccctattcactggatatactttatcgaaacccatcttcaaaagaatatgatagaacaaaaggcaataatgcaatccagaagccatcacactaaggctggataaggtatcccaatattagtaaagaatcacaagacgatgtaaaagagtaaaatatggaactgttctcacagttaggcatctcaccaaaaaaaaaagaaaaaaagaaaaacagcaaagaagtacaacatacatgctggggacctagtacaaaaaatccaggccctgcgtttgatatttgagtctttgtgaacacaagtaaatgctacttacttgattcagatgatcctgtgctcctgggaccctctactccatctgaaacctacaatcttcctgccaactgttcatgtgattcaggaaggttagagagtagggaaccgatggagacctccaatttaatttctctctgtgtgtaatgtcagactgtgggtgtttgtatccatttatatctgttaaagtaggaagactttctgacaatgtatggacaagaaacagatgtttgaggatagcagaatatcattagaaaacaattcagttttcaggcaaattctgtttaataattacccaggcttcttggttgtctatgtctgactacctgaccatccaagcagtagcagtccatgggctccaactcctagagttgtcctcaagttaattctgacattgatttgcaattttaaaaagatctgtcagaccattgccttaacaatcttgtattaagggcctgctttaggtcaaagtttttgtggttggggtacacgtttctctttgagtttcaatcagagaacctttctatatcaaacagtaaaatgtatgtgtgaaggctccacgaaaacactagcatgccctccatgttcaatgaatgtgagggtgttgtcctcagcaatgtagccctgctctaattttgcagagtttattacagacacagggattcagagtctaatataacaggcaaaagatctgcatggaatctcaacatacaaatccacaagaacaaagaacaaaatatgctggtgtgttaatcagtttcaagagaaatatgtaataccaatctattatcatcagtaaataattgatttccaaccaagctcaagcattacctgatatcatagtcctcaattggttgacaagaaagaaagaagagtatgtatatgccaaaatgcacaggatatatgaacaaagattagaaaattgaacctgtgaccatatatggcaacatgaagataacaagaaaattttctacactacacttgaaggtacaattagtgcttcagtgataggtagggtattatctgcaaatgttactgtttcattttttcacagactctatgatatgtaggaaaactgacaatggcatagaaattcccacagtagatcttccaatgtacaaaaaggatcctgacttcctagtgcttttcacacattaatgtccaaactgaattatctgccttgcacatgaaacaacacttcaaaactgagacatcgacaaaatgtcttaagagaagcagaagcatcagaagcaggatgctgtttcctgcagaggagacaggatcagtgactgggagctgtaatgctgtaaatcaaacaatccctgactttgctgattgccactggaactgactcctatagatgtcaggatcaggctgccttgtctggttcagtggctctggccatacctaggagctactgtttcctgggtatggccagagcctggcagcttagaagccacaggactctcgcttttataagcactccctgtccctgattgaaggattgtgtgcattcaaatttattatcaaataggaaccaatgagaagagtggtctcatttccagcactggaggcaactcctgtggttcccttggagatctgaatcagagctgctgactcatttcccctcccaccttgaactgtgatgaaggagaagcagtgaaagtgaaagtatgaaagacaaaaaagacaaaagtgcaatttaccctggtttctgatgccaattttcaaaatgaaagaaaacaacctgtggcatgtaaaggctgatcatatatctgctgcttcagcaagcatcattgctatctacatgaaagctctgtttctccctggaggcacctgtgtttctagcttgccagtagcttcttgttactgacattttttttttttttggtatgctgtttgggattgctcaaatgtaatgaaaaatgctggaattttagttttctctttatatgtacatgagtgtatgaaatacatacttagattgtaagtggaaaggttcaccgaaagccctcctatgctgggaagcaaaaaaatgactgccttcgctaatccccttgggctctgactcctgcggatgtcaggagctgtctgcctgtgtcagtgtacagccaggctctggttatacccattatctattgagttttggagaatagtctgagcccaactggtaagaagcctcacagtggacacttttattaggactccttgcctcggattgaagggttgtgtatatttaaaatgggcattgagacaataagaaaagtgatcacaatgcaagcactgggggcacatcctgatgttctcttggagatctccatcaggactgctgattcatctctcgctcccaactaacgtgtgctgccagagaagcatcaaaattaaagcacgacatgaaaaaccataatttacactagacaaaactccaataatcaaaaagaaaaaaaatggaacaggcggcaggtaggaatgcacatgaatcaggatgctcggggcaacatcctggctatcaaaataaaagctaccaattctgcctggagatgcctgactgtgaatctgggctgccaagagactcttgtggcttacattttccgatatgccctgtcagtttagcaatgctaaatgcttcagttttagcttttctccaatatatgtacataaatgcctgaaatgaaatgcttacattgtaagtagaagttttcagcgcaagccctcctgtgctaggaatcaaacaatccctgcatttgctgattcccataagccctgtctcctgtagatgtcagcagcagtctgccttgtctgtgtccttgtacagtcagcctctgactatatccaggatctactgagtaagttcctgcactggtcatgctattgttaacactctttgtccctgattgaaggactgtgtgtcttcaaattgagcaaagaccaagagccaataaggggagtgatctcatttcaagcaatgtaggcaaaccatgtagttaccttggagatctccatccgggctgctgactcatttctctctcccacctcaatgtgtatggcagcttaagcatctgaactgaaaatggatgccagaaaaaaatattggttaacttggctttgactccagttatcataggaatgaacaaatctgttcaaagcagggtgttgctgtatatccagctgcttctacctacatcccgactagctataaaaaatgtttctgtttttccctgcactgagtgtttgtgactgggctgccaattgctgtttgctgctaatatttcctgatttgtcatttcagcttcccaaataccatgctaaatgtttgaaatttagcttctctccatattatctattcacgagtgactgaaagagatactgaaataatatatgaaattattagtttcaagccttgctctgaagggaaaaatttgcatgctgtatccaacaatgtcctgaagattaagcaataatttgcactattctttttggaaagaaatattatatatatacattatatatatatacatatatatatatatatattaattttaatatatttatatgactttatttatagttcatctcaaacatgtctgcatgcatttgccatgaattttttcagtgttgtgatatattcatatttgaatattatttttcccattcaaagctatcattttattagcacatcatttacgtactggtttgcacttatctttgtagttaaatcaaaataaatgacataaaaagctctaaatctttaagttatcagaacttaactacaatgtgcatgaataactgtaatcaaagtatgaaaataattattaatcttaaaatattaagcaaattccaaaatatagcgcttgttataatgagcatatattttagtttatatggtattttatgactgaagttattttattttttattagaaacaatacacattttacatgtcaatcccagttccctctccctcccctcctcacctgctcccccaccccctcacagtctctttctgctccccatgggcaattctcaaagtgctgtatcatttggagcagtgcctagactccccgtcccccccatgagtctaggctgaaagagtatctctccatgtggagagggctcccaaattccattcctatactagggataaaactggtccactaccagagaccccatagattgcccagacctgcaaactggaattctctcttaagagatcttgaacagtcctatgctggtttaccagctatcagtctggtatccatgagcaaccccttgttcaggtcagctgtccctgtgggtttctcgagtctgattatgacccctttgctcatcatttctccctctcttcaactggtttccagagttcagctcaatgtttagctgtgggtgttttcccctgcttccttcagccacttaatgaaggatctaggatgatgtatgaggtagtcatcattatcattatcagagaagggcatttaagttagcttcacaactaaagcttagactgttagttggggtcaatatcgaggatgtctggttatttccctagttgactataattatcaacatgtcatgacgttcccttcactagagttcttctccaatcaatattccttcccccagtttacacaggagattacactttggagggcaatacatgcatcccttttagggtactcattgtaacccaacttctctgggactgcagatttattgaaaactttgctttataactactatccactaagaagtgactgtttagtatgtttgtgtttctgggtgcaggtttcctaactcagcataactttttcaagttcatgtgaatgaaatttcatagaatattacaattttgtgaatattcagtaccttccctgaatagagctagtatacaggaggaaatctgccatgcctctttcatcagctgattaaataataaaagccacttcgataacctaatggcttccggattcaaacatgggttaattagttgttcccttgtgatgacatattattatttattaaaccttccctgaggattcagaaggcaaagtaaatctcaattatagagataagtcattggtggtgcacatcttgaattgcaagcctcatgagatatattccatgatttatagtaaaataattatgaatgcacatataaatatctgcatcttagttatatgttctgttaataaggttactttaccaatttcttacactatagaatacttagatactgttccttaagccattaataaacatatcatttctactcatatcactcctgctgtgttaatgtcaaaatgacagctaacgaacaacaaaaaatcttggtaaacttgatgaattcaccaacttatccaaatcttacaaattaccaacatttaggccttattagtttattggtaacttggctctaaaagacatgtctgaagttcactgtagcttgcttgactgaagcagacatatattatacatgctcaatattagaccccagtcagctatacatggctatatggtccatggacccagaagcaaagcttttctctgcaacttcctgaagccataggatttctagatgtgttatcaaaatttaccctgatagccacaaaccacattgaatgtaactctctaaaaacaacattttacacaatttcacaagtgctcaattctgtaaggacttacattattgtgtccaaccacacccaataaatacactaaattctcctttataactaaaccaataaaatcttacatggaacaggcaaaatcaatttatggtactaaagaaaaaattgtgttggaccaaagtgtcttgaaagaagaactgggaattttaaagcacagaattttgaaattttgaatacacaaaaaccacaaaacaatagaaaccaaaaacaaccaaacaaaatgtttagcacaatcacagcataaattgccataccaacacagatgaatctctctcaacttttcacagttagcagaagagttatagacaaatgatgagcgctgagatacagagaacccatttctagtctacaatattactcacagatctgtcctttaaaaatgtaaatgctaaaactatcacttattaaaaccactttaacaacactgtgtgggttacttaggtataaaattttacatgtagaataaaataattttaataagatgtagtatttatattgacatgaaggaaaacagacatggtattgtaggaggaagctgaattatgtgtgaaataacataaataatgtgctcaagtatgaattctcaaataggacaaagatgcagaaacacacacatatatatgtaaacagattgaaaaaaacgtatatatacaaataaatatgaatatacatatatacacataagaatgtatttaataggcactgagaaaatacttggagaggtatgtttaataactgcatgtcttataccatgaagggatagaagtgatatctctcttagttaccagagttactttgatcacttggtagctaagggcattcccatagaccctcactagagcctcaaaaagcatttccacatcatggttatatctcctaacacgatggtaagaaacaatttctggcatttctccttacttatgttatcatagaatagaaacccatctggtccctggttagaaacttcaatgaatctgccctagcagaaaatagtgatcagtcttcagccatattctttacacagtggcttaaatatcatgggagtaatcaattactcttttaagttaataattaactccatgagattgaacaaatatccactactgctaaaatgtccagtaaactgggacaggaacggtcacagacctatgcaaaaatgatttctctcattctgttagaggaataaagagttccactaagttgtaatggtatattgatataccaatatatctgtgaaataattgccttaatcagttattacttcaatcacagataggaaataaaatgaggatttgaagatgggctctttctcatgacctgacaggctttgtcctactatgtgatgatgctacttgtcttcatcgagccccatcactacaggctcatgaagtattttcagaaggaagcagaaagattctaaccgattcagaagtggtggatgatggtgctgtcctgtagcctccactttactatcagatataggaattcagagtctgaggtagcagacacagatcttcacagggtcaaaatttacaaaaagaccacaaccaagaacaaagacttgtgaattttaattaatttcaagggatgtatataataaaacattgtcaatatcagtaaataattgatttccaacaattatttccaacctgatacctggcctggtgtcatggagaggaatgcacttactagaaaaatataacaaagtcctagagtttttatatgccaaaatacgatggaaatgcatacaaagattggtaaatgcaaactgtgagcataaatggcaacaagatgaaaacaagtgaattccctgtactatatttcattgtgcctgcagtaacaggtagggtggcatctgcaaatgttactgcttgatattttcacggattctaagtgttgctggtaaaaactgacaactctgtaacatttcacacagtggttctcccagggaacagaaaggagcctgactcccatattgtctgtcaggtagtaaagtctgaaatggattgtcttcttagcagagggtgtagaacttcaagagtgggacaggggtatcacatcttaaaagagaagcactatctcagaagcagaatgctacttcctatacgggagacaggaacaggtgcttgggagcctgggaatgaaacaatccctgactttgctgattcccctgggttctgtctcctgtagaggtcaggagcagtctgccttgtctgggtcagagtacagtcgggctcgggatacacccaggagcaactgagccatggagtatagcacgagcccgactggtaagaagctgccctgtggatgcttttataagcaccccttgcctttgattcaagggctgtgtacatttaagttgggcatggagccaataagaagagtgatctcaattccagcaatagaggtaaatcctgatgttctcgtggagatctccatcagaactgttgattcatttctgtctcctaatcaaaggaaccctgcatcagaagcagtgaaattggaagtatatgagaagtgaaaagtgtaatttgtcctggactctgcctccaattaccgaaaggaaataaagtcaaccagtggcaagtagggggtgatgatatgtctggctgctttggcatacatcctggctattgatgtgaaaccatctgtttttgcttgcagacaactgattatttttcggggctgtgaatatctgtctgctgaattatttcttgtgccaattcagattctccaaatgcattttaaatgcttgaattttagcttttctcctatgtatgttcatgaattactaaatcgttatgcttgtattataagtggcaatgttactttcaaaccctgctctgaacataaacaatttccataccatatattaagtatcaagatgattaagcaataattacagatattccttttagaaaaatatttataatatatgcttactctcaacaattgcacagttgtttgcatgattttatttctggttggttccacaatgtctaaatgtatttggcattacttttcctttcacagcaccaattcatactcaggaaatattctgttcagtattaatatgtgaattctaaaattttgaatgaatttactatattacctgcagtagaattcctcttaagtcactacttcaaacttagttcatatctttactctcttgctgtaacatctgtgttcaggtaaagcacctctgtacatatgtatatggggcctactacaagcatggtcaggtctaaggactagcatatctgagctattctgtcattccactttcatctcctaattaatcaacacaatccactgttatgatattttggattcataattcttccacaggacatatttgaatgtttcctggctttactagtgaaaaaataatgcctgcatatgaagttgatgtaatttcaataagtcaatagtacttaaatacccatcacatattatttgcatatggaggtacattatcaatgtcagattgaatagtgtttctcacatgtacagaatttgcaaaacatgctataaaagctgtccaagaaaactcagagttcttactgatggtgatactgggatgccagttactgcttgctgtggccattttctgatatgagaacctgaaataagatgcaatattgtaaatagaaatgttcctttcaatccatgttctgaacatacccaatttgcataagctatctaacagtgtcatgattattgagcaataattttggtatgcattttagaaagaaatattcataattcatgtatactctcaacacttgcactttgtatgtattgtttcatgtgtggtccacagatgtctgcatgtattaggcattattttttgtttggagcactttattcagaacagttgtttgggaaatcccacctaatccctgcctatcttaggttttcaattcttctgtctcctgcaggtatcacagacactttttgcattaatgtgtgtaagttaatttcccacattaacgacattcttattcaagaaacatctaggcaaagccattaaatatccccactactatagaaattcaggaggaatccagtttttccttccatctctgctcaattgacactaccaaacatagtgacccagtttgagtgatacagctttcctcacacctggttctctcagacctcactgttccaaatctctagttctcctgaatatgaaattcaactggaccttctctggtgatgcccatgtgtatctaatgactagtttgaaactgtgcatcattgactgattctgctttcactacctggtatcattcagtacttaaggtgatttgtttgccaatattgctcaattgtgttgtttccaaaacattcagagtgacccccccttctcctaagtcacatatcaatcaaatgatcgagtcaatgagtgattattttctgtgttaaatcttttttgtatttctagcaatttccatgtttgtccttgatcttactattctatggaatctgacattaattgagaataacccggtagctaatggaagcagaagcagacacccacaactaagcactgagctgagctaagcaccagttgtagagagggaggagtgataatgaacgaacggggtcatgaccaggctggggaaacccacagaaacagcttacctgagcaaataagagcacatggaccccagttataaagctggggaaccagcattgaacaaaaccaagccctctgaatgtgggtgccagttagacaggcctgggcagtatatgggatgtctgacagtggaaccagtatttatccctagtgcacaaatggatttgggagcccattccacacagaggaatactatttcagcccagatacagggatgagggcctatgccttccccaaaatgatgtgacagaattttatggtgccccatggaaggcctcaccctccctggggactgaatgggagtgggatgtgggccataggagaatgtgagggagatggaacagggattgacatgtaaagtaatcttgtttctaaattaaataactaaatttaaaaaataaaattcaccaggaaaaacaaagtataatatctacatggtggctcactaatttccccattttatgtttcaatgtgggaactaaggggaatcatttgatgtttttctagatcatttccttctaatacataatgcctttaaaggattggctgtagaagctatcctctttactattggtctaatctgggcctacttctactgttgtccaactagagataaataagaagccaataccttcattttcctatctaatccaatacacccactatgactgtgggtccaatgtcaaaggcgtaagccacaattcaaagatatgtgattcacaaaaaaaggaagcacatttttcctcagcacttttccctctaattcataatctgtaagcaagcaaataaacaatggctcaatagcttactacatttacttagattatattgacacttgaatgctcatcttgtttatgtcacagcatctatgaaataaaaacaaaagtacaaatgctaaatggtctcacttagccgttcacagtttatgtgtcagcatctgcttctgggggaccaaaggattcaacagaggagtgactgcctgtactggttgtgcctggctgtatcaaggaaaaccagtgatctgttactcaatactggaaatgcgttgtttccatggactccattcccagtcacatacctcatccctggataattcaagagaaatctccatacagccatagtagacaaaacttcacaaatctagggaagtagaattttcctactcagccttactccgcctggagttggaaacttactaggggcctgaactgtaccattcatggaggtgtaggtctcttcactcagatgggatcaacaagaatgaaggatagttatacccacctccaattctttctccattattgttatttgggatattaacttgagtggaagtcttctaaaatcctggaagcaagtccccaaaaaaggttacttgagggaatttgttcatttggataaaacctgagcacatttcctggggagaacagaagactgagccacggatacaccaaattaacaaggttttccagtactatttagggatggaattgtcccaaaataagattctgctgaactttgagatggatgttttaaaagcaccctgggtcctaccatttaccctatcattacattttagacatcatcagagaaggtggggctaaatgagaaattgtactgactagctcattttaagacccaaataagacattgtactgtgtactttcatgtctgtgagtaaccacaaaggtaagaaaacagatggctcaggggttaagaacactgcctgttgtttctaaggtcctgagttcaattcctagcaaccacatgatgtctcacacccatctgtaaggagatctgataccctcttctatttgcatgagacacttgactttcctcctacctccagaacttctagttttatattgtctcaatctgcctgcttgcttcattctgttaaatgcatgcaatctacctaatggcattaaacaactttattttaaaaattaatttcaaatgctgtggagctggaatcacaggctgtagtaaactgcccaatctggatgctgtaatccaagctgctatcttctgcatgaacaataagcactcttaaccactatagaactttaagtttctgtgttgctttttgttgttgttttgatttgttttgttttgttttttcagccagaactctgtctaagccagtgtactggacatttatctataatacatgtcagtttcttctgtcaagatcttaaagggacttccatgcagattaaataaacaaaaggacatgctcataattttgtgttttggcatgcatgtccccaaatacttcctgagttttcagatataggcaatcctgtgctcacagcatttcctttgtcaagtaaactcatgttagacaactgcaggcaggaaatgaaacactttccttctaggctctagtgaacataatttgttttctaaatgaatatatgaatatggtggagaggcaccatggtcaaggatattgaagcaggagtcctggctgtgtcagtatccctgtactccatctgaaatcacacactattgacggccatttattggtaacctgagaatttcctaaggaacatattgtttactgtgttgcttcctgataagaagttaagttttagcatgtgaggaccacagagaatgtaataataactgcctttggtgtaacaaaaagcctttgtctttctgtgcaggcagaatgactgtgcctgcaactgcaacaaagacaaagaatcaattcatggaaacagaatgctaatgaggagacactggtcagaaaaccgggattcagtgtgaaagattgacaaggaaatctgccgggtaaatttctttcagtgggagtacacaatacatactattcggacagcacagacagacaattatttttccgataataccatgccttagaaagaaataaacacacagggaagagagaaaaactgtaagaattcgtaattgccagactgcagtaaaaattgaaatcttactgtagaaaccaggctgaaaatttgaacttctgtgtcccttgaatgcagcaggatgataatacacaacattgccagtgttacacgtcttagcccacagaggatattaagtgacaggttcgataatgcctgaaatgttaaaggtcaaggctctcggacagtctcagtggccatgtgaaaactgctttcgccatagcaatccttcactgtgggtcccccacggaagtctaaggaacagcacatctctggtctctgtcagaaactgattccaaactctcagaatattccttgcaaatgatgcaggactgcaaggcagaggcatggatggcagattttaaagcagaagctttaaaagcaggcttcagaagcaggctcacatttcttacacaggaagcaggagcctgtgactcagagccggagtgcagggaatttcagcataaaacaggctatgctgggttttcattggctttgtcacctgcacggtacaggcttgttcttcttttgttttcacagcttacagtcaggctttggctagatcaggtaccagatggtacctggattctagccaggagcctgactgataaaaacgctagctgcagagatttttattacctatggctgcctctaattggaggagtggttgcagtcaaatacagagaggatcaagaaccaatcagaagagagatctcaaacctaggcttgtaaagcaaaagcctgtggtaaccatggtgatattccccacagcagctatttctctctctctctctctct

SEQ ID NO: 43 - DNA, 45578 bp, Cricetulus griseus
  >scaffold_64 dna:scaffold scaffold:CHOK1GS_HDv1:scaffold_64:337435:383012:1
  misc_feature 17329..17428: /note="n is unknown"
  misc_feature 32007..32106: /note="n is unknown"
  misc_feature 34922..35021: /note="n is unknown"
  misc_feature 37000..37099: /note="n is unknown"
ggccaactctaacaggaaggccttgttcccgcgcgtcccctcactgctcagacgcatgagctccctaaactcagccatcagggtgggaggaaacttccagggcgtcccggggcgagcgatgcccgcaccagccccgcggtaacgggatgcagcagagctccgctggtacccagacctgcttctgagtcagccgctgtgggtggtgtcggctccccgagagcagaggccggcactccccattggtcaacgtgaggctggcggtggctcctattggtccagtgccgcgtctcagcgcgtggccttctgggagttgtagtctgggcgtccctggcgccgccgccattgtccatctgctcgggtggtccgcaggacggggcagcgctctagattaagggtcgccttggacgtctgttgctgagctgctcgcccgggatggacccgcaggaccaagtgacaacagtggcgatggcctcgcggccgcaagatacccaactcaaggtaacaataacgacggaggggactccgggccccgcttcctccacagactggtgctttttccaaggaggatgcaaatgcggtgtctcaaccgccgagctcaggaccgagcccagccccgtctgcagtttgcatgttccaacctcctgtctccctgctggggtgggaggagggggtggtcatttcccagaggacaggagggaccccgctcaggggtcaccccactccggccgacacctcctcacacatccagaggacgtttctcggggatgacaggtgagtggccagcgggacaaggcacccgcattgcgggaaccgtcctcaggacctgtcctgagtgcagagtcaacggacttttggccatcaaagttccagcactttgtacacaaactggatgcttattctgttctccatagtctgtcttgcaaaagctaaaaaaacaattcatatgtaagttcctgcgacttcagaattactaatggtttgcttagggggagatttgcaatattttacatttggtgtgcaaaatgctctgattgacagtcttaagatcgcagcttatctgatttctgttatttgcctttcctgtgaaatgtgaccattgtggagaactgagaactgagggttatcaacagctgtattcatgagccgtggtgaaggtgaggtctccagccccaggcaagtctcaggtgacagtcattaggctggcagcttgacagagaataaacgatgttagaagtgcctttaagctgttacagtgtagtggcctgaaataaatacttcatggtttctgacaggtaggaagccaagagtgacttagctcatgggtttgcaataggctcttaaaagttagtcaagatgacagcctaacaattattacttgagaccagatagggcctaaagacctgccttcgagatgattgcttcacatggctgctggcaggaggattctgtgtttctccatgttggcctctctgtggaagcacttggatctcacagagtagtgtgtgtggtttcctgtagagtggtgatccaggagatggcaaggtagaaactgtgttatgatctcagctcagactttacactgtcatctccacagtctcctgtcatttatacaagttaacatttctgtatgcaaaccaggatatcactgaggggccattttagaagctagcctccacaggagcaaggaccacaagtagaggtctttgaggtctagtacagtagtttcttgtgactgttacaacaagtcactacaaactttgtggctaaagacaatgtacattccaagccaatcatggtggcatttgcttataagcccagcaccacttgagaggctgaggcaggaagatgataaactcgaggccattcttaagcctgtctcaaaagaaaaagagaaaaaaaaacaaaacctcaatctagagatgagaagtcagaaatgggcaccacagagcagagccgcacttttaccaagtttctagggggaggatatctgttgattgacttttccaactataagagctatagccctggccctccttgccttatggtctttgtctagcttcagagcaaggtagcatttaatgatgacattgccttctgatttctccagtctcctgccaatctcctaaatgaatgattgcatctaggacccatgtgggtaacatctttggctatgcagtgtgtctgaggcaaacctgggatgcttaaaatcctgtctcggtcggggggggggttgttttttaagtgttaggagacctggggagatggctcactggtcaaaatgcttgctgcacaagtgtgaggactatagttcagatccccagaaatcatataaacgctgggtgggcatggtggcccacctgcacttccagtcccagaagactggcaggctagccccaaagcaagctgcctatggagacgaccaatatcagtaagctctggatttcactgagagatctgctcagtgaatccgggtagagcaatggttctcaacatcagcaacgggcctccatgcatgcccctattgggcatactctcactcatgtgtacctacacacgtgcgtcacaaacgtgacagcgggaaggagaggaaaggtgttgagaaaaactggtacaggccagaaaggaccacttggacatgggagggaatggtaagagctaaactaaaagtgtgtgtttaagaaaaaaaaaaaaaaagtgctgtgaaagccagacagtggtggcgcacgcctttaatgccagcattcaggaggcagaggcaggtggatttctgggagtttggggccagcctgggctaaagagagaaatattgtctccaaaaaccaaaaataaaataaaaatataatagtggggtggtggtggtgggacctgatgatcagataacagataatgctgacatggcctggccatcagtaaagggatgtgtggaggacaaagagctgaggctctcctctgacctccaacacacctgcgctcacagctactactactcactcacaaacacactcaaaaaaacaaaaacctcgtaaccatttctctacgtcataaacctgatgtcagtggtctgaccgggtctggtctggtcagctgtggctgtcttggttgatccagccgagagctctcatgtgttgtcatggtaacccataccgacttatagtgacccatataggcttcccgtgaggcctgaggtacgtcacacagagggtatattttctcagggtccctgcctccctgttttctcccggccttcctcttccacagaggtagatggcccgactaactgagaacgcatgtgatgttccaggagcctgtgactttcctagatgtggctgtggactttactcaagaggagtggggacagctggaccctacccagaggactctgtatcgagatgtcatgctggagacctttgggcaccttctctgtgtgggtaaggcccccttctcaggctgagttccagttctgggtctctggtacggggctctaagttaaccttgagccctcatttcctgaaggatacactggttgggaggctgccctttctgtcagtgagccaaatccttgtgactggaaggtgctcgcccacgtgtcctggtggtcaagagcctgagctgcaggctgggcttgtttgtcccagtgcagcctccgacctcctgggtcttttcctatttccaggtcctgatcttcccaaacctgcagttatctcccagctggagcaaggtgctgagctctgggtgacagagaggggaggcacccgggcctgccatccaggtaagaaccccaccaagtgggtgctcccactgaggagattccaggagggaggccactggagatgagcttctgggaagaatgatatttcatccctttcctaggagggttcacgggacttggtaccatcctacccacagctctgactgattgtagcccaaagatacagagcgaaacctgtgagggaagggaaaagggttcagggggccaaaatctaaagcagtgattctcaaccttcccaacgctgtgatcctttaaccccttcatgcagtgttgaaccccagccataaaattatttacactgctacctcatagctgtaatttgctactgttacagaccacagtgtaaatatctgatatttccagtggtcttaagcgacccctgtgaaagggtcattcgaccccccagccactggtaggaaccaggcctgagcttccagctctttagtctgtgaagtcagacagaattcactcggttatctgataatacatgaggactgttatctccagagaggatgacaggttttctcccgggggcaccctctgcctcatacatgccacgattctggtgcttgaaacaagccacaacagtagagcagtgaacttttcttaccaattagggtagtgggaacctaatgttcgctaatactcccaagggccagcctgtgagcaaatgtctccaggactatcagcttggccagttgtcatggatttccggaaggtgcccagtggaggattccccatagcctcaccctcctatgctcacaaaagctcttcttcctctccatcagtgagaggcttgcctcgcttgcatttctgctccctcttcctctctaggccagttctttcctcatcggccttcccagcatcctcttcatggctttcatctccgtgttctgctcagtttttggatgttagattctgtaaacctgttcctcatacccttctgctagtgtgttatcagaaaggattctatttaggtattaaaaacttagcctggcctggtgatgcacacctttcatcctagcactcaggaggcagaaacaagtggatctctgtgagttcaaggccagcctggtctatagaccgagttccaggacagccaaggctgtacagagaaaccctgtcttagaaaaaccaaaaagagccaggtgttggtggtgcgcgcctttaatcccagcactggggaggcagaggtaggcggatctctgtgagttcgaggccagcctggtctacatagctagttccaggacaggaacctgcccctctccttgtttttccctactcagagctctttgattttttctttcaggttggattcttggacctgaagaccacacatcattcaaggagcagaaccatcctgagaaggaactatcccccattacagaaagggatgggtttgaaagagctatttcttgtcattccatgacagggatagatcagaaaagtgattaccagaggctggcactcaagaaggaccagatttacttagggcagttggaaggccccaaagaaataccaagtgaaagctatgcaagtcttggacttggggagacctgtgttcttagtgtaagcacagatctattaccagatatttctagaagagaacatggctttactcctggctcccaagttaaaaactcagaacataacccaagcttagttagtcaacctacagactccccagcaacagagccctttgatgacagtggctgtcaaaaaacctttgatcagactatgcccattacagaattcacaaaaagtcaggtgcaagataaaccctataaatgcactgattgcgggaagtcatttaaccacaatgcacacctcacagtgcacaagagaattcatacaggagagagaccttatatgtgcaaagaatgtgggaaagctttcagccaaaactcctcccttgttcaacatgagcgaatccacaccggagacaagccctataagtgtgatgaatgcggcaaatctttttgccacagtacacaccttaccgtccacaggagaattcacactggagagaaaccgtatgcgtgtcaggactgtgggagagccttcaatcagaattcatccctcgggcgacacaagaggacacacaccggggagaagccatacacctgtagcgtgtgtgggaaatccttctctaggaccacttgcctcttcttgcatctgcggacgcacactgaggagaggccgtatgagtgtaatcactgtggaaagggcttcaggcacagctcctccctggcccagcatcagcggaagcatgcaggtgagaaaccctatgagtgccgacagaggctgatctttgagcagacatcagctttaacaaagcatgagtggacagaacccctcaactgtgacccacctttgagtcaagaagaaaggactcagcggagcgacaggccctttaaatgcaatcagtgtgggaaatgtttcactcagagttctcacctcatccgacatcagataactcacaacagagaggaagaaccacatggacgaagccgaaggcgacaacggccctgtggtcggggctcaaagctcgttcagaatccacacttaaattcaagagagatccccatggcccaggcaaaggcaggacaagcaagcagggcactggccttgtttgaccttcatgaaattatgcaggagaaaacccctgtgcatgttattggggtagaagaaccttcaatgggcaattctatgttatttgacatcagagaatctacataggaaggaaacttaagataactctggagttactgggtacaaacgttaagtccacaaagagaagatggcataatgtcagtggtgacctctgacttcatgaggaagtggtgcctcccaaacccttgaggtttgtggttctcaaatgtatcaagctcgggttcctgtttaacagactttttctttgttttcctgagacagtctcatgtggcccaggctggcctcgaactcaccttgtatctaagaatgaccttgactttctggtccttctgcctttacctccctaattctaggatcatgaacattgtgcccctatatccagcaacagtagacagaataagatgttttctccattaccctaaaatgagttgaccggtaataaaacctcggcactggcataatgcaaaaataatatctgacccctttttgtaaacaatggctaatttataatcgaatggtatatactgagtcagtatggcatcttgccatgtctttatgtgtgcttattttcactaggtcaatgacctgtaactttcagactgctgcaaggcacacggatgtctacaaaactgccacaagggacattaatgtgtcccaggtgattttgccgagttgtgatgaactcttatgaaagtttttaaacaatccaaaatactgtggcatatgtggggaactctgcctaaattcaaaatatacacaaagcaatggcgtgtttctttttttttaacttttttttaaagattttattgattatgtatacaacattctgcttccatgtatatctgcacaccagaagagggcaccagatctcatagcggatggttgggagccacaatgtggttgctgggaattgaactcaggacccctggaaaagcagtcagtgctcttaacctctgagccatctctccagcccatctacaacattctttaaaggagtcacagttcctgtgaaaaccacttggaatatctagggttgctgttagtcagaggtacccatttgcaataattcatccacagaggacatttggtaatggtgtcactgcaacttgaaggatgctactggcatcctggtggaggccaaggttctgttgaacatacttaagtgcccagggcaactcctccaagaatcttctagccccaaatatagtactgagatggagaagccctgatacaaactcaacacagagggttggaggtgtagctcattagtagaacacctctaacatgtagaaggccctcagttctctgcccagtacacaaataatagccaaccttttctaaactggaaactgactgaacaaagctatattaacaaccatgtgagtttgttcttaacaaatagagccatgaggggttggagagatggctcagaggttacaagcattgactgctcttccagaggtcctgagttcaattcccagcaaccacatggtggctcacaaccatccgttatgagatctgatgccctcttctggcaggtatccaatgatacattttcattggatatcccgcccgtctcctcaggcctgtccctccctgtattgttttcacacccatcccagaaaatgtttcctttatctctgaatatattcctaaaaggctaagactaagtgtatatagccataaccatattgatacacagggacaaaaccatttgcatagtcacactaagccatcctatctggggttttgccctgttgatgttttggtagtgcttctgggccagaatctggatgaaagcagtgtccagaggttcttgactatactcttcttaacgggagcaaaaaatattaagaaaaattattcttttacatctcaaggaaaaatataacaaataccatcaaataaccaatattaagatgttcctggttgcttcataaagtttgtatatgctttattctaaccataatctatacagtgtgtttggtggggtttttttttgttttgttttgtttgtttgtttgtttggttttggtttggtttggtttggttttggtttttcaagacagggtttctctgtgactttggatcccatcctggaactagctcttgtagaccaggctggtcttgaactcacagagatccacctgcctctgcctcctgagtgctggaattaaaggtgtgcgccaccattgcccggctggtttctttcttaagtcttcaagttgtgctgtttctctgtcttttgttggttacttgaataacttaaattttgttcccgtccattccatcctccttgctttgatacggtgaactgacttctggtttggtatcaagctgctgagctgtgctaaatcagggaggggtataatgtcatgtgactacctttgttctcaaatcccctctccctaccccaactttgtgtgaagtctctacaagagcactatgggaaacctcagctgttaatgccaggaaaagctagagtttttatacaaagcatgctattcattttaacattcacagaaaagctcacccttacctaactactttcctccacatgttctcttaagaaaaaagaagaggagccgggcggtggtggtgcacgcccttaattccagcactcgggaggcagaggcaggtggatctctgtgagttccaggccagcctggtctccagagctagttccaggataggctccaaagccacagaggaacccaccctgtctgggaaaaaaaaaattttttttcaaaacaaatccaccatggtttatggcaaaacagagatcatagccttagtggagacttcccttactaatgagggagaaatctacatgacatcttaaggaaaacaagcaagatgtaaaactttatagtatttttcatgtgtagagaggaagcatttgcttatgtatactcaggcacagagtcgctgagagggcgaaaagtaagtatatgtaccttctgcccttgggaagggattggggggagctgggatgagaaataattttaacactatctttttatgttttttagaattttgtaatatgtaaaagtattatcaatttaaaaaataaatctaacagaaacctcaattctttttttattaaagtatttaaaatttgtttcattctttattgtctgcctcatcctgccaaaatttttataggaataggaaccccagtgtgtcttttgtcatcgttcttctgtgtacactggaatgtgtgttcataaaacagcttcatctcctttatactaaaggtgaaaaggctaggaagcacacacagacttcctagttcccagtcgttcctatccatttattagtcaacccaccacgagtttaccagaaccccatattacggccaacagccaagtacttcagatagatcatgagtggcagtaatcttcccgcctctgcctcggaagttctaacattacaggtgggcatcgtcactcagcttgagggtagccgctttacaagtgcatatacgttgaggtgtgccacctgcctttaatcccagcaccccagaggcagagttccaggctagccagggctacatagactttgtctaaataaataaataaataaataaataaataaataaataaataaataaaatgtaatagtaggcattcttagccaggtaggcatcatagaacccaatttggaacaaatctatattccttgccatacattctaggctcacccactttcatgcttactgacatctgctagccattctttgatgagctataaactcacttttcagagtttgcctgtctcccatccaaaacataggtagaatttgaaggactctagcagacccaagcatggcaaacatggcgccatcaggttttgccctttacccttctctcccttgctaaaccattaggttacattcctaaagctagccaccaagttgtttgaacatcaaagcccaacaaaacatcaacgttcagcaatcaaattaatcattttgactaacctaattaaaatacctaagcatggggctggagagatggctcagaggttaagagcactgactactcttccagaggtcctgagttcaattcccagcaaccacatgttggttcacaatcacccgttatgagatctggtgccctcttctggtgtgcagatagacatggaagcagaatgttgtatacataaaatctttttttttaaagattttatttatttattatgtatacaacattctgcttccatgtatatctgcacaccagaagagggcgccagatctcataacagatggttgtgagccaccatgtggttgctgggaattgaactcaggacctctggaagagcattcagtgctcttaaccgctgagccatctctccagccccccataaaatcttttaaaaaattaaaaaatacccaagcagaacttaccaatatgtcctagctcattcgaacacaggcctccctcttttccctcctaaaattaacacatgcaaagctatttgctgctgtttcagcccgattcagaatcagccacctcgtcgctgccttgcttaataatagagccctttgcatttggtttgtgcttgaaacatggtgtttaggtgtggtctttgcccaaacaagggtccagagggtaacaccctgcagtacacaggtcccttcagtacacccgcctacattatacacatcgcatagattattagaaaatactacatgttccccttcaccttggactgagcttcatggtgtggtgtccagcccacaatgtttattaaatgcctaatcaggcagacatccgtgttattactccccttgctagataggaaacagatcctaagttgagtagtaggatcccagcagaggacaaagttggtttgatcctttatctgataggatatctgaaagacgggtgggctcagggcaggtccgtgccctaggagtccgctcaatgcctttgcctccactggaagtgtcaaaaggattctttacctcttgagcgtttccgtggggaactgaatttttggactgctgcagtaggcaacctgtgactgctgtttatggaattcggtggagcatggagccgggggccgtcacacagattgttacacagcgcactgtttgctttgtacggagctcaaagactcatcaacagtttcacaaaccacaaccgggtgcctcgcctggagctgggagctgtccgaggtgctgacacaccctagccctgagctttccgtctggcaccgttagtattagctggctaagagtcgctaaattcaaattaaaaaaaaaaaaaaaagaagaagacaaagggaacaagcttgttccctaactagaactaataaataaattaaaaaaaataaaataaaaaaggaaaaaaaagacaaaggctgcggagggttatagcttggggcttcaggttgtgcttaatgtgagtaaatctatggatgcaccagcacccccccccaaaaaaaaaagcaaactatggttgacaagactgagtttggccgggcgttggtgtcgcacgcctttaatcccagcactccggagacagaggcaggtggatctctgtgagttcgaggccagcctggtctccagagcgagtgccaggataggctccaaagctacacagagaaaccctgtctcgaaaaacaaacaacaacaacaacaacaacaacaaagacaagactgagcttgatcccagaatctgtatggtaaaaaggggagaaccgacgtccacaagctggctcctaacctgctcgcttgcatcgtggcgcacgcacgcacgcacgcacgcactcatgcacgcactaaaaaaaagtgattattttaggttatgtatatggatgcttggcctgcttgtgtgtctgtgcagcgcctgtgtgcccggtgcctgcaaaagccaaaagagggcaccaaagctcctgcaaccgcgtctgtgcgtcatccgagggtggccctggcgcattcacctgcaccgtgcatgctcccgcttcccgagcatcccacagcctcgacccccagccgtccctgtccccacaaacgccgtttgtgggtcggatcccccggaacgcctcccaacacgcacgcaggcttaaaagttccctgcccgagccagggacctgacgctgtgctttctggggcttgtagtccgggagacgcacccccgtggccgtagcgcgcctgcgctaggcatgtcgggaatggtagtccccgggcaggaaggcgccctgcgtgctcgtcatcagggcgccgggagttgatggagaccgggtgagagggccggagagccggctacgagggctgagagctgcccacgcccacgcccaagctgaccgtgaggaaggacggacggacggagtgtgggacggactgacccagagtccaagacgggcagcctgaaagcggcccggtgcatcacgtagaaaggaagtaagtttttgtttttgtaacaatttctttttttttttaagattttatttattatgcatgcaacattctgcttccatgtctatctgcacaccagaagagggcaccaggtctcattacagatggctgtgagccaccgtgtggttgctgggaattgaactcaggacctctggaagagcagccggtgctcttaacctctgagccatctccctagtccaccactggtgaactcttatcttactggatggatggatggatagatagatagatagatagatagatagatagatagatagatagatagatagatagatgtgtgtgtgggtagtctgtatgtgcatcagacatgtgacttgcaagcgctttctttccttgtgtggggtgtctttacatctttttttctaaagatttttatttttatttatttatataacattctgcttccatgtataactgcacaccagaagagggcgccagatctcataacggatggttgggagccaccgtgtggttgctgggaattgaactcaggacctctggaagagcagcccgtgctcttaacctctgcaacccaggaagtagttcttcggtgggctgtgtacgtgggttgtgaggcggagcccgtggggtgtgtgactgaagtgtgagccggagcctcagtgtctaagatgctgagaataaaatgctccccctgcctcccaagcactgggtgtatgtgcacccccacgccaaatccttgacccgtttttattctgccataaaatgtgtattagtcgagccagccctggtggtgcctgctcttttcgaggccatcctgatctacgtagaatgttccaggccagccaggacttcatggtcagatcctgtgtcctggttggggttgttgttgttgtttctgtttttccaacttgacgaaagctacagtttatccgggaagagtaacttcagttgagaaaatgccccccgaagagatgtcttgtaggaaagtctatatataggctgttttctcgactaatgattggtgtgggagggatcggcccattggccacccctgagttgggggtgatcctgggttatataagaaagcagactgagccagccataggaagcaagcggcccaccatggcatcttcttcagtttttgccaccaggttcctggcttgagttaataccatgacttcccctcagtgatggactgtaatttgtgaggtaaaataaaccctttcctcccccaagttgcttttggtcaatgttttatcagagcaatagaaggtgcaagctaagacagccctgcctcgtgtgtgtgtgtgtgtgtgtgtgtgtgtgtgtgtgtgtgtgtatgtatgtatgtataaaaattatttagctgatttgaccttttttatttttttgattttttgagacagggtttctctgtgtagctttggagcctgtcctggcactcgctctggagaccaggctggcctcgaactcacagagatccgcctgcctctgcctcccgagtgctgggactaaaggcatgtgtgagccaccaacgcctggcctgattttacctttgactaatttttttttttaaatatttgccctggcctattagtttggacctgggagtagtttactgctattcagggacaatatggaaatttctggagtatagttgagtattatgacgactaaggacttgctgatatgcttgaataggagcagagtgacagagtcctccagtctgagtactgtaatgagtcttttctctgtcacaccagccagctcccaaataatgacatagagactacttattaattttgaaaactcaaccttaacttaggcttgtttctaactacctccggtaatttagccccttttctattcatcacgtggctcgtggcttttacctctcctgcatgtcctgctttctcagtgtctggctggtgacgctcccttttttcttcccagagctcgctcgctctctctctctctctctctctctctctctctctctcactggaagccccacctatacctcctgcctagctattggccatgtagctttttattaagccaatcacactgacatatctttccacggtgtaatcagatatctcacaacagagtaccaagcctctgaaggaagtgttgtccccttccagatgttagtagcttccccttctagaaacagtgactggttctgaagtgaactaatactgagtcagatggcaggaggattgtgagttgtgttatgtaaggagagctagactcgaaatgtaacattgatccaaaaggcatgaccattttaaggatcctaggacatactctgtgtgtgtgtgtgtgtgtgtgtgtgtgtgtgtgtgtgtgtgtgtgtgtgtgtgtgtgtgcatggcccatgtgtagaggtcaggggacaatttataggagtcagttctctcctttcaccatgtaggtcttaagggattgaatttaggttggcagacttggtagcaagcacctttgcctgctgagccatcttaccaactgataacatactctttgtaaaaggcttcttaactgactttctcgtcagccctaagcagcatctattatgcactgttctcctgcggtttggaaaggttgaaaggcattaccccataaaggaaagacagaaggacatcaggagcctgaggtccaagcccagctctccacttactgacaaaaatgaccctgggagctaactcagtttccccaagttttaaaatggaaacagtaatcctgactcatagagtatagtgtggcaacagaaacaaaaggctggtgtggcctagcacgtaatcggtttccagtgactgaccttattttctcctgactgttccacatgatagccacacctactagttactttatcaacctgcctgtcttcttctagtaaaagcgctgagcccaggccccaggtcttcctcgtcttggcatccttagccgagctggatacctagaaggaactcgttgaaaatgtcttaagcaagactggcatttgcacatgtgtaagcagtaaggtaaacccaaacccctgccttgattgcatttgctcattggtttgagatgggtttggtaccttacttttctattgttatgataaaacaccatgtccccaggagaaagcatttttatggagtccacggttgtcatggtgggaggcatgtcaacaggaatgcgtggtgctgaaacagtagttgagaacttacttttttttttaatactttatttttaactttattttatgtgcattggtgtaaggatgccagatccccaggaactggagttacagacaggtgtgagctgccatgtggttgctgggaatagaacccgggtcctcttgaagagcagctactgttcttaaccactgagccatctctccagctctgagaacttacatttgatccacaatcaagaggcagagacaagccgggtgttggtggcagaggcaggcgggtctctctgagttcgaggcctgcctggtctacaaagaaacaaagagaaaccgtgtcttgaaaaataaaataataaaataaaataaaagaggcagagacaacaaacagggaattgtgtgagcttttgaaacctcaaagcccaccccctctgacacacctcctccaacaaaacctcatctcctaatccttcccaagcagttctaccaagtagggaccaggcattcaaatatttgagcctacagggttcactgtcattcaagccacctcatttgagaattgttgcctgtctgtctactatctctcttgtctgttttgaggctggctctcactgtgaaccctggctggcctaaaattcactaggtaaatcaggctggcctcaaactcagagctctgcctgcctctccctcctaagtgctaggattaaagactgtgccaccatgcccaccttacctgtttttaattattttgtgtgtctgtgtgagcatgagcatgtgcgtgctatgggatgtgcctgtgcccagaggccagaacacagcgtctgaaagttggccggccctcgccctgcctctccttgtttctgctgcactgcgtactgcagactagctggcccacaagctccctggtgattctctggtctccgcctcctttgctgccatagaagtgctgggattacagatgtgttctactgcgtccagctctctgcaggatctggggattgaactcagggcagcaggcttgctgggtgaatacctttacctgctgagttgactctttgccccctctccttttgggaggggggggggcaagcagtgccttgctaggtagctcagccagccttcagagctgcagtcttcctgtttcatcctcccaagtgctggatttacaggacattgacccccacgcctggactgaagagcgcctgacttttaaagtgatggcaggtggattaaaaaaaacaagcaggtggatacaattgtgctatccaccaaatggtgactagtaaaaagccaagtacagggcagnnnnnnnnnnnnnnnnnnnnnnnnnnnnnnnnnnnnnnnnnnnnnnnnnnnnnnnnnnnnnnnnnnnnnnnnnnnnnnnnnnnnnnnnnnnnnnnnnnnncccagcaaccacatggtggctcacaaccatctgtaatgggatctgctgccctattctaacaggcaggcagaacagtgtatacataataaataaaataataaatctttttttaaaaaggagagatcctgcctcaatttaaaaaaaatatagatagaacctatcaaaattgtgatatacaacaagagccttttagagggaaatgtattgttttaaacacatgcacttgattttttagactttttttttttttcaagacagggtttctctgtgtcgccctggtgtcctagaacctgctctgtagaccaagctggccttgaactcacaaatatctactgcctctgcctcccgaatgctggggttaaaggcgtgcacctgtaccacccagatgaccttagacttttatatttattaatttatgtgctttcatgctacaacataccactttcaatagtcagttttctccttctgccacataggtcctaggtatcaaatttatgtcatcaggtctgttggcgtgcccccttacctgatagccatctcgataacccgcatgcacacatttggaaagaagcaaggtgggcaggcctggtaggacatgcactgaggatgaagcaggagaatggtaaactagaggccagtctggaaactggcagaaaaagtgaataattcgccatgtggttaccaggtcaaaagacaggaagacaggaaatgtgtaagagacaggagacgtgtctctgtggctagccatgggtttgcttgcatttgcaatctcctgctaatccttccctagctgggagacttggagcagatcctttccatctgtctgtcttccctaaaataggaatacagcttatgttccttgagtctggtgtgtgtgagccactgtgtgggtgctaggaatggaacccaaatcctgtggaagagtatccagcactggttacttctgagccatctctccaacccctaagcagatttttttttttaagatttttatttatttattatgtatacaacattctgcttccatgtctatctgcacaccagaagagggcaccagatctcataacggatggttgtgagccaccatgtgggtgcagggaattgaactcaggacctctggaagagcagtcagtgctcttaacctttgagccatctctccagcctgcagatttttttttttttttaatatgtggtactcaagtggaggtcaaatggcaacatgcaagagtcagttctctccttccgctaatgtggttcctgtgcctttacctggggagccatcccattgcctgcccccctctttcttagccttattgaatttgttatttgatcatttcatacatgtattctcattactataatcccccatgtccctcccacccctgtggtccccttcttagaggtcttctcgaattcgtgactgttttgtttttgagatctactgaatttaaccaggatcatctgtgaccgtgggtttgaaactctctggttagtgggttcctccctggagcttagtgggttccttcctgttgtatgttttgttttgttttgtgtttgtttggtttggtatatatgctctatctgcatgtatgcctgtatgctagaagagggcatcagatcccattacagatggttgtgagccaccgtgtggttgctgggacttgaactcaggacctctgggagagcagccagtgctcttcaccgctgagccattgaccaggaagcattttgtgggtctctcctgctcaggtgcaaacctggtcactgtctccctgttgggggaatcgaaccctggtcttccacgtgacaggtggggatacaagccatttctccagcccctgttgtatattttgtgcgtggaaccactgagcatcgtcctcagctctgagcaggctctgccacggtgattacactcatcttcttctatgtgagaaagagtggcacggtggcaaccaccttctccagataatctatctcccatttaaaaagaagcgaggtagtcagccatgtagtacgtgcactgagcaagatgaggcaggggaatggcgacttggaggccagtctggctacctcaaacctgcacctccctccctcttttcagatggcggagctctaacatttctgcagacccaattcggaggctccaaccatcccgtgtctccctgagtgcatccacccaatggccatccccaagtgccctctgagcccagtactctgggaacaggacagcctccttcaagtgaaagtgaaagaggaggacgaagccggcctctcccagagccacggagctagccctagccctaccgcccatcctgaggccgcacgcctgcgcttccggcacttccgctatgaggcggcctccagcccccatcaggcgctcgcacagcttcgagagctgtgttgccagtggctgaggccggagtcgtcctccaaagaacagatgctggagttgctggtgctggagcagttcctgggtgccctgccccccgagatccagacctgggtgggggctcagtgccccaagagcggaaaggaggctgccgttctggtggaggatctgactcagctgctggacaagagaggtgagcaggagccgcaggctggtgggtcacagagcgctctggcacagcctggctcgaatggaggagggcaagctcagaatcgcgcgctcaggtgctcgttctcacgtttgtaccttagccatggttacacgtggccacctccaaagcaattaagggtaagggcttagatacggcagtatccagaagatacatacgcccagggaaagcttgacacccggcccacttgctctcacccactcccaaattctctgtctccattacatctgggtttttccacatcagtcttattttatttttattaaagacgaggtctcttgtaccaaagctaacctcaaatctaccgcatagctgagggtgaccttgcgctcctgatgctcctgcctccacctcccaggtgctgggattacaggcctgtgccgccacagccagcttgaggtggtactagggatcaaacccagggctttcgtgcatgtaggtaagcactcggccagctgagctacacccctggcttataagcatctccccagggagaacaaaggtaagcccatcagtccctgacttgtttattacccaagtggacagggggaaaacagctagcagggtctactgtgagcctcactgagctggtcagatcttgtgtttgcctttggacagtcaaatcccaggaaccaatagtgagcctggggcacttccccaaaggaagtgtaggctgctgatgaaatgactggatgccttgaggggggggcggggataagtatccctgtgtatcctcttgtggccttccctgtgccagcccacaagatctggagggtggttggatggccctgaactggaataggtacttgtcattcaaggagacacacagatgtagtccctgctcagagaagtctggtaggatgcaaggaaccaagcatggtacagtctagtccaggagcttccagagcaagtcccaatctggccgcaagctaactgatcaagcacaagtccctcagaatctctactactcctatgattttattgacttatccattcatggagacaaggtcttactaggtagctcttagcttggaactactatatagcactgtggctaggaacaagctgtattatagactagctgggcttgaactcagagattctcctggctctgactcccaagtgctgggactaaaagtgtgcttgaccacacataatcctgtgatcttaagagtacctggaactcagcacctcctctgctgggccttagtctcctcatctacagcaaaacaactaagtacctccttctggaaacaaaatgaggccatgagagttacacgctgcactcggagtctagcatataacaaaacctttataagccctggcaggcaagcagtatgacaaactgaggtccagatgatggcagtgttaaagcttcaggattgacaacttggcagttcaaagtctggggttagagccctatttgtgagtctactcagccccagtgtagagtagaacaacagcttttgcatccttctctgactcacccctgggattcatctgtaaatgttgccagatgaagtatcctcagataccctttgcacgtctgaagggctggtcagtgcgggtgtgcctccccctcctatttactcagacagagctgggagtttcggaagtaaatcgcccactaaccatagcagcagatgtctacctagaggtctgctgtgagagatggcagtcacaggcatctggattgattctcatttagccactattcccaaaggcagctgctgactttaaaggacagagcctgaactctcagagcttggccctgcccaagattgccaggaggagatgcacaggcccagcttggcattttagccagacccatttagccttggtaaagtggatggctcgattgggtgaggaaaaatcagaaccatgatgctatttagagtagtataagagcacagccctgaatcctttttcttacccaagacaccagaggggaaacttccctttggaaatggggccatatgacaaggccggtccacatctcccctttcagagtgggcgagcagggtctcaagcagatggagaggctggtgtgtggtgacctgtggtggggaagtaacgatgtgctttgaatgattccaggatgggagccaggagtgggacatgaagaggcaagttgcaagcagagcaattcagatgagttacaaccaccggacatggccaccgaaacactcataggaggtgtttcccccagatccaccattgcccacacttgtaaacccgagagcagctgtgagagccagccagagctcctgggagcactctggatgaagtctgcggcccaagagatggatttcagaaaagacctggggcctcacatggatgcctcagggaacagttccaacttgtggtccagcttcccttcccaagacagggcctcttccgtggagagatttggcccgctgtgtgattatgggacagtgcccccagatacgtcctcgggaaagaagtacggtgactgtttgagaacattccagaatacgccagccctggaagcccaccagcagagccactctcagaagatgccctacgcctgtatcgagtgtgggaaggccttcagcaggagcacccaccttgcccagcaccaggttgtccacacaggtgcaaagccccatgcgtgtaaagagtgtgggaaagccttccgacgagtcacccacctgacccagcaccagagggtccacactggggagaagccctataagtgtgaggagtgtgggaaaaccttcagccgcagcacccacctcacccagcaccagcgggtccacaccggggagcggccttacgagtgtgacatgtgcggcaaggccttcagccagagcacccacctgacccagcaccagcgcatccacaccggggagaagccctaccggtgtgaagtgtgcgggagagccttcagtgactgctcggcgctggtccgccacctgaggatccactctggagagaagccctaccggtgtaaggactgccccaaggccttcgcccagagctcctccctcactgagcaccagcggacccacacgggagagaagccttacaagtgcagcgactgtggcaaagccttcagccgcagctcagccctcatggtgcacctcaagatccacatcactgtgctcccgtgactggaagcaccacggcacagcctccctcagaggctcgacatctaagaaacccggaactccacaggaaccaggaaccccactggttggtaactgtggcacccagggtctcagggcagactggggccatccggggagctcctctacatttgagatcccaggtgaagtcccctcgtgaacagagattcagaccaattgggggaagcttctagaagcttcctactgccctctctgtcccactcaggctggtcccagagaagagacacctgagctaaggctctgcattggttcttggaaccagagaaagtaaagctgggtatctgtctgggctcaggtgacccaagatcccctaggtaggaagacccaagcttcatgctctcacgtggctaccgttgacaccagttccggtactgttgggcttggaaaggatgcctgccaggcccactctgtgccttcctacctgcttccccgccacactgatgtatggccaactccaagacagacttgtgaggccacctgtcctgtgaagccctctccatgccaccatcctcctcaggtttgccctgctttcgtccacagtggtacttgacacttgcccagtatcgtcttctcctcccaccccccacccccacaccccacccccaccccccactccagccctgtggattcacctcaggctcatctctaacccagcccctcctgcctcatcaccttctgtgagctctcattgcctcccactgcattttaatcggggctctccttcctcgccccttcctgccttcattccgtccccacccactggcttccttgctgcagctgtttttgctacccgcatggtatcgtgtcattccgtggcaggaagtcatctggtgagtcaccttttcagcaaacgctgttgagtgaggtaccagtatgcccggatacacgtcaccttggcccaagcaattgctctggttaccctcgaatgtgtatatgaatgtttgtctttgttgcgcagtggtgtcaaagtggtttcaaagttctggtctgcaaactacaccccttgccttttgtctgtgtttgctccagacctggcctcctcgtgtatcgtcccctcccgtggcctcactttctcccacctgtgtgcctttctagctgtccctggaaccctgacgccctctgtcctctgtggtatctcagatgtcctcgagagcttccccagatgttggcacctgacagtctctggctgctgtggtcccccatgccagtggccttgcatttcctacagaacgcacaggccagtgctgtgagcactatgctagatgcacaaaccctctccggtgtccccaggatgagtgggaccagtacctcccttgggtagttaactgtcctccacccatgtcttcttcataaagatatttatggaagagcccctgtacccacataagcctggctgcagttgtcaaaacaaagcatggctatactgagtcttccttgccttgggtcctcaagcccgggatgccatagacttaggggatgccagcactctgccggtgtttaaaatcataacccgtttactccgcctacctaccttccattccctcagaaagccgatcccctggctctcgtgcctgtgactaacctgggtgatttcacaaagtcctcagtcatggatctacgtgagctactgtatctagatccattagcgtaaaacattctgttttcctgagcctcccgtgtctcgtgtggccccagctgattgatgtcccctacaagaacacagaccaccaggagagccacaaactggagaatttcaataaaagcactgaaatgactaccacaggggtggagactgcattcaggttgggcttgctcccgcatccccatttgcttgtgttgccagccgagggaatcctccaggcaaaagacactgcaggcccttacacagggctgctcactccacggaggggttaggtggatggtcttcaggtaggactgagaacctgtcccccagtttgcagggttgtgggtccctgtgtatggggtatagagctgtgcccctaggtggaagcaatgcgtgggtacagaattcacacacacaggccatctcttcacaaggtggtctgtgatacttaaataaataaaaagagttcaggcgagacaggctggcacccacccactgggctctgatctccagaacacagagctgtcgagtctttagaccccaagctctctcagaccctgggacgagagccgtaacggggcgtgctgcagtggagggttgagaaatcccaatacctaaggtggcctgttacccacgatgccagctgctgccactgagagcgagctgagcaatgccaacacaagagctccgaaccccaaaggctggcgatcctcgagggcttcgcttggatcgtgacactagggggcgcccgtctgccgctgctcgcacgccgagcttgagctggcaagccaagcaaggaaagcagaggtgacggaaagcagcacgtggacggtgtccaccagcctgccggtgacatcatcgggggagagcaggagccccacggatgactggcagctaacacgcaagcgcccagtccaaggcagccccagctgacggttgccaagcccaagccctgcagcaggctcgcagtgacagggacgccaccgagcacgggtgtcctttccgtgcaggcgttgatgagtgggcactcgggacgaccacactgtcagaccctgtccggacagggcagggagacgacagcaaggacaaaggccgggtggcgggaggtgaagcgggggtgggggggaggggggtccccgactttggccacggccggtaacagaccccgcacctcccagtcgcagcagggtccaggaagccagcgagcgggttttgcacatcactgagtgccctgagtgcaaacgcggggccaggcctggagcccaaggctcgcaccggaagtgtgcagtttcgggaggggatggcggccccgttaaaggccaggaggtccccgtttttttgaaggctgcagccgcaggactggacggaatgctccatcctcatcagcagctgccatggcgcccgggaccgcacaggtggggaacgaccctccctccccctgccttgggacccgagcgagaggggtgggcagcgcagggcctggtgggaaatgtagtccaccgactccctcctgtgtgctgattgagggagaggaggctggctggacgtggcagcaacaggttcattaccaccctgcgttatcaaggagatggtgaccgcagagacgacctcccagtcccctgctaggctcaggtaaaaatcagaggacgatcggaaagtactaaaataccgcagtgagcaggccgccctccaccctgcagaaatctgggtctctggaagcagagccgactgagtgtcaaagttcccttggtaacggtaagtgcagccagtgtgaggaagaaccaaagcccccaaggtagcgtgaaccctgtctgttctcctcatcttgtataaaatgacctggtcgagccaactgccttttgtcaattctcataatgctcacccattgatgctttgatttctgccttcacccgattttgtcattttgagacaaggtctggtatagcagccaggcagtggtggcacatgcctttaatcccagtacttgggaggctcttccagaggtcctgagttcaatttccagcaaccacgtggtggctcacagccacctataatgagatatagtgccctcttctggcctgcaggtgtacgtgcaggcagaacactgtattcctaataaatagatctatcttttaattttttttttttttacattccaatcccggttcccttccctcatctccttctgctctccctccactgcacctcccatccgctcctcagagagggtaaggcctcccacaggatggcaactaagtctgttccatcacctcattgaggcaggaccaaggcgcccctgccccatgtctaggctgagcaaagtatctctccataaagaatgggctccacaaagtcagtttgtgcattagaggtagaccttggtcccactgccagtgtcctcatatactgcccaagccacaccactgtcacctgtattcagggatcctagttgagtcctttgcgggttccccagatgacagtgcggagtcaatgatctcttactggctctggtcagctgattctgtgggtttccccatcatggtcttgatcctttgttcatatcactccttactcaatttaaaaaaaaaaaaatcttaaaaaaaaaaaaaagacaccaggcatgatcttggaggaacagctcctcttcctgggctcctagatccaattgggagagccaggctccaacaaaatgaatactcagatgactgagaaaaaaatgtgtgtgtccaaagtagaggttctggataaggctttgtaaatcagccactggggcctgctatgaaacagacttaagtcccccacatcaagctgacaaagactacagcccccctgtccctttaaagctggggtaaaggggactgagagagtggaaatcagatcagcaggcccttgcaaccaaattctgaagatggagagttcagaatcttcagaaccctctggacttgcgtgcccagagctccttcgggcttctgttgtttggtggtgatgaaaatggaactcagggccttgtgtatgcttgaacaagtgttctaccaccgaaccacacctcagcctccagctggtggatttggggcaggcattccaccactgagcttcttccctggccaatgctattcttcaccctgtatcccaactgagtgagggggtgggacttgatttcatttgtcatcgtcaccctggcaactgacactcctcctgtcattccccagtaccactgagctaccctgatctgtggtcctcatttacagctaaatttactaagcatcttgaagggccttaaagccagcgtcccagtgagtgcacctaactgtgttgtgtcaactgtttctgagtcggtcaacgtcctgctgcctgcaagatgtaagactctcagctccagcaccacatttgcctgaatgccgccatgttccccataatgataatggactgaacctctaaaactaagtgagacaccccagttaaatgtgtttaagagttgtggtggtcatggtgtctcgtcacagcaatagaaatgctaagacgggcaccaccaacaaaaacaaaggattccccaaaagtagaaagtagaagcttgataaagccatgagttcaattagagcaatggcaaattatgtgtggctaccttgttaaagaaatctctccctcttattctcacccaagcaacctgttaactgtctgtaaatcctctgggagtagagtgacctcataaagccccaccccaccccccaacttccttgaagaaagattatcctggtaatcatagctgttgacagtttgttcctcccagaggacagaattccacaattctctgctttgaagtccattgcctataacaggtatgcgtcccacacaggggaagccaggcttggttgggtatgctgtttggttgcaggaacaataaaaggcccagagcagtaagaatggtcagcttgtctgccatggagtctacagaagggtagacaaaaccaatacaggagccacagagatgcctgtgattggtcattctttgcttttgaatttttttattgcagctactaatctcttgtgtgggtgtacgttgagccatctcatcaaccctattttgcttgtttgtgtgtctttaagatgtatttaccgttgtgggaaggaatgcatattcaaaagcatacatgtggagatcagagaacaatttggggagcagctgtctctttacaccttcttttattcatttattcatttatttgttttggtttttcgaggtggggtttctctgtggcttaggaggctgtcctggaactagctcttatagaccaggctggtctcgaactcacagagatctacctgcctctgcctcccgagtgctgggattaaaggtgtgcaccaccaccaccctgcttccttccaccttcttttgagtctgccactgaatggccaatgcccctgtttcctcatcccatttcattacaagtcataacacaattatataatatgcagagtttccttggaagaggttgaggagtggagtaaattcttccctaggtcatgccaggtccataaaaaaggacaaaacttaggtgcctgcagagctgtgggagacacagtgtagcaggaaggcaggccaggtgaaataggagactccatgttcccgagccagccaccttaactctcagtccattccttcttttgctgagtgacggaccccgttactgcatctctctagtgtctccaggatgtctgtgccataaggttgccctaaagagtaaatgatctgattcccagactcccaatgtctatatagagccttcaagtttactgaaggatgagtgcaacgaggaaggggccaatgaatgagagggttggcaatccagatacgcaccacagagctgtcaggagcctccccgaggtgacatgggagaaaaggccaacgagggcagaggtattttagtttcctgtgaatggtggcttagaacagcaatttcttctttcagaagttcaaaaatcaaggtactgcaggatcctgtgccccatggaggctgtaggaaaggatttttgtcatactgattccaacctctcctggttggtgccacgggcctttaatcccaacactcaggatgcagacgaaagaggatctctatgatttagaggctagcctggtcttcatagtgagctccaggacaaccaaagttatatagacagaaaaaacaaaaacaaaacaaacaaacaaaaaaaacaaaacttctggtggctccaggtatttcttggcctatggctgcaccactccaatctctgcttcttgttaattaaaaaaatatattttttatgtatatttgtgctgtgcatgtatacctgtgttgcagaagagggcatcagattctattatagatggtcatgagtcagaatgtggttgctgagaattgaactcaggacctctggaagaacagacagtgctcttaacctctgagccatctctccaacccccaatctctgcttctacagccatatggcctttcctccaaaattctttccaagggggagatgtaaactgcgtctagtcggtctactaagattccagtggcaaaccaaggcacattccaccaaacttccaggggtgtaggtacccctcccccaacaggccccatctgaaaagtctatccctcagagaggatggtttcccctcagccatagctgcatagatggagcctccctcccctagtcttcctggcctgtatattctagcccctccaagatgacatgcaattaaggcagagttgcatacaactgtatacaggtgagctcttatgacccttcccaagcctccatgacggaatataaacagtaaagtctagattgtataatatttctgcaaggagttcagctgaactccccaaaatggcgatttcttggctctgaggatagccaagcacaacgccttctccccatccccgttttgtggggggtggtgatgctggtgggcaagagttctgtcgctcacaaaggctgtcaccatattcaaggcccatctctgtaatccaggatgatttcatcatgaggcccttacatcatacatcctagttcaaaaaggtcgcgaccacagtctgaacatcagaacaggaacagacctttctgggggaagagggttaccattccacccacctagacagcaaatgatagccaggccagaatgcatggatctgtcatggctatgaggccaagtttggccaagcaggtggacttatcgaatacccacacattccaaaccaggcgaaaatcaggttcacaatttaaacaaacatccatggtgtcgtcaacaagagccatgaggagccatcatgagacagaaaactgtaggaaggcctgtccacagcctgatgccttccatgaggtgggtgtaacaggcccccagaccttagcacaactgactccatgatggaagtacgttcaggccataaaactcaacacaaagacctaagccatcaaagtctatagttcgtggaaagtctctaaatggactaaccctcctttggggcttctatagttctgctcctggctaactgttcttgttaactgaagtatgttaacccaggacatggcttttgtgcttaaaaactcactctgaaaaagggcctgaggctacaccaggatccagaacacccagtgtagtcaccagccggctaataaagactttctactggcttgaatctgcatccaagtattcttctctgatggataccccacagtagctgggaggcagaggcaggtggatctctgtcaactcgaggacagcctggtctccagagtgagttctagtacagctgaggctacacagagaaaccctgtcttgaaaaaaggttcacaactgccctccagctccagaggatcaatcaccctttctggcctccttggactctcgtgcacacacactgacttacaccccacccccaccccaaatagtaacaacaataatattgttgggtttttttttaagattttgtttatttattatgtatacaacattctgcttccatgtatatctgcacaccagaagaggacaccagatctcactacagatggctgtgagccaccatgtagttgctgggaattgaactccggacctctggaagagcagccggtgctcttcacctcggagccgtctctccagacccccccccccctttttttttttggttnnnnnnnnnnnnnnnnnnnnnnnnnnnnnnnnnnnnnnnnnnnnnnnnnnnnnnnnnnnnnnnnnnnnnnnnnnnnnnnnnnnnnnnnnnnnnnnnnnnnttaatttattatgtatacaacattctgcttccatgtatatctgcacaccagaagaggacaccagatctcactacagatggctgtgagccaccatgtagttgctgggaattgaactccggacctctggaagagcagccggtgctcttcacctcggagccgtctctccagacccccccccccctttttttttttggttttttgagacagagtttttctatattgctttggagcctgtcgtagaacttgatccatagaccaggctggctttgatctcacagagatccacctgcctttacctccccagtgctgggattaaaggcatacgacaccaacgcccagttaataattaattttttaaaagattttttttgtctttgttttgtttttagagacagggtttctctgtagctttggaggctgtcctggatcttgctcagtaaaccaggctggccttgaactcacagagatctgcctgtgtcagcctccctactgccgggattaaaggtgtgtgtcacccaccactgcccagcaaaaaaaaaaaaaaaaaaattagggatgctttaatccaacatgcagatttgagttcaaggccagtctggtctacacagcaatttgcaagctagccacagatacatagtgagactttgtctcaaaatattaataataattctagctgttttgactgttgttttgaaatagaacctcacgttgcccaaactggccttaaactcattgccgagtggagggttatagccctgaactgcccgccctcctgcttctccttcccaaatgctggggtggcaggtgtgcaccaccacacctggcttgtgtaaagcgaattttacctgtgcaaatcaatttctgaagtattgctcttaacctctgggccatgtacaggagccccttacctaccctctgccacctcgtaggtaattctcaaaaggtcaacaaaaatgtccattatcaacacttgtggtgcagcgacagtttccaaagtgggggtgacactcggtggccccctgcccacaaccaccacaagccgggctcagtcttagagctcatgaggtggacatgtcatttccccccttcccctccctccccacacataggtgtgaactcagatcagaaggaaaccttatgtcaccagactctgacaaggctcagggagctcagatctgatctattcacagagacgcttttaggactggagagatgcctcagaggttaagaggcccggctgctcttccagaggtcttgagttcgattcccagctcacaaccatccgttatgagatctggtgccctcctctggtgtgcagacagacatggaagcagaatgttgtatacacaatatatatatatatatatatatatatatatatatatatatatatatatatataccaacatgtgtctgtatggtgtctattccccattctgtccttacgccttaaaggcagaggtcagcctagttaaagggacacacctgagccgggcgttggtgatgctcgcctttaaccccagcaccagagaggcagaggcagaaggatctgtgagttcgagaccagcctggtctacagagtgagttccaggacagccatggggtacaaaaaaaaaaaaaaaaaaaaaaaaaaacctgtctcgaaaacgcaaaagccagaaaaaacactcctggggtgagtctgcaggcaacgagaccccgttatcagcaccaagtagttgcgatcgcagataaaggtgaattccaattaaaagtgtcacccgagagatccccggggctggcaatctcgccaccccccgggagagccggacagacagctgctggttggcgacccgagtctcgtgtccccgggttggggccttgagataaaaaaaaggccgggacaagagaagccggagtgatcaagacggaagtggtcccacgccggaagcctggaacacgctgagcacgctcgcccggagggtaaagggtggggccgctgcttgcgaactcggatcagtggcgatcacggggccagacccactatttcggcgacacgcactgagccgagccggctgccttagctaggagcccacggctcccggcgccttggttcggcagccggtgtgccgcgagcgtggaaccgacctgtgccctctttagatatggcggtgctggcttcgcggacgtttctgcgcatgtgccccgcctcgtaagccgggcaagcgcttcagacatccgccagaagccggttgtggcgctgcttctcagactgcgcatgctccgtagggctccgaggtcgcctctcatcctcaactgccgattggcccacgagcgcgtgtgttcctccgcgcctgcgtcccccgcgtctgacccggaagttctcgctcggcttaaaggcgccggcccgctgcgcgcggcctcttcctgtctgtgccagggcggcgcgtggtccacgccgagcggccgacgagtcccgtctgcgccgtcaggtgaggctgcggggggccctgcagtaacagcgagcggggccgccctgagtgctccgggggacatctggggaccggggggcgggacccggggcctgggccttcccgtctgggcctcgcctctcccctccgggaaagcgtgtccggaaacccgcgggcccggccgcccctggccgcccctgcgccctgcgctgaccccgtgcttcccgcactcgaggccctagggaggccactcggatgccagcattacgtaggggggacactcggatgccagcattacgtaggggggacactgggatgccagcattacgtaggggggacactcggatgccagcattatgtaggggnnnnnnnnnnnnnnnnnnnnnnnnnnnnnnnnnnnnnnnnnnnnnnnnnnnnnnnnnnnnnnnnnnnnnnnnnnnnnnnnnnnnnnnnnnnnnnnnnnnnacggatgccagcattatgtaggggggacactcggatgccagcattatgtaggggggtcacacggatgccagcattatgtagggggggggcactcggatgccagcattatgtagggggacactgggatgtcagcattatgtaggggggacagcattatttaggggggtcactgggatgccagcattatgtagggggacactcggatgccagcattatgtagccatcgggaaagtctagtttcgcggagatcctgttgctcagcacacgttttcttcccggacagggagggaggtaaacgtttgtgtcggttgtccctctggattcctactgcggcccctagccccgtatcttaccgactgaacgctgaaagcagcacctggccttttaggatggaagcttcgtaaatgcacggggaaagctgggtacgggataggtgtatatgagtgtctgcgtggactcgggagccatcctactgggtgccgtgtaccagctgcttagcttggtgatttttttttccctaggtttgttggagacatgttcaaagttgctgggtccccatttaactgcccaggtttccaccagatgggggttacttagcctgaagagtttggggtcgatgtgattgttctagggcggacggcagtaacagtttcttctcgatgtcccgtccccagaatgactgagtgggagacagccacacctgcggtggcagagaccccagacatcaagctctttgggaaatggagcaccgacgatgtacagatcaatgatatttctctgcaggtaaaaaggaacttggtggtggtctgtggggcttttggttgggagcagctgtggattcttacagttcagaaagggaagcatgacacccaggtttgaattagtctgtttaccaccacgtagcagaccaataactggacagccttattatagcctgtaccaaaagttgttgccgtgtgttgtcacttttcattctctgaatccattgtctattgagacagggtctcggatatgtaaccctggctggcttggaactcaagagatcctcctgcctctgttgcccaagtgttgggattaaaggcatctggtttggtatcactttgcattctatgttcagttaggtgtcttctgttgcaaagaccagtttaaccaactgaacagtgctgggattaaaggcatctggtttggtatcacttggcattctgtgttcagctaggtgtcttattgaaaaaactactttaaccaactgaacagtgttggcactcttgtcaaagccagttggtaagctgggcatggtggtgcatgactgtgttgctggtttctggctgtggcaagaagattttgagtataaagccagttgcgctgtagtgagatctcctctactgctcccctccccgaaagtgtcagttggctatgggtgtgtgggtgctcttgaatggctgtgttggtataggtgcaaattaaagtggttgtgaggtttctggctttgcactcataacccctctggagacagtctcatacctcaggctggcctgaaaacccactctagtggcattctgctgaaatgctggaattacaggcatgtgtcatcgtgcccagtttcacacactactggaaactgaacccagggttttgtacatacaaggcaagcaccctactaagtgttgacccttggagtccacgaaaggatatctgacagctgtaattgtcctctggcctctacacacacacacacacacacacacacacacaccatgcatgaactaaaaagaagagtatacagccggacccaggcattatatttaaagtatattcagacttgtctgctgggtctttactttgtgggtgagtttggggggctctgcagtattatttttgcttttcacatgttgggccagctaccaccgaactgtaatgtgtacatacccaggaacttaggtaatcgcatttgcctcacaggtcacattaagtctccactnnnnnnnnnnnnnnnnnnnnnnnnnnnnnnnnnnnnnnnnnnnnnnnnnnnnnnnnnnnnnnnnnnnnnnnnnnnnnnnnnnnnnnnnnnnnnnnnnnnnttttttttttttttttttttttttttttttttttttttttgataacctgctatctactcacgacctgtaattcgccatgtagcccagaataagtctaccaagtgctgtgtgcagtgcacaggacgccccaccccctgctgaggattgcttgctccaaagtgtcagcccagcaatctttgcaatttgagaccaggcttggctgtgtagtgagttccaggccatctagggctacacagactatctcaaaaaaaaaattcttttggctagaatgcccataaatgatttattttctgtgcatttgtattttgtctgcaagtgtgtgttcaatccaggaaattgaacctggatcctttagaaaagcagtcaatactgaggcatctctccagcctctatagtagttttttcagggttttttttatatatacaacatcctgcttccatgtctatctgcacaccagaagagggcaccagatctcattatggatggttgtgagccaccatgtggttgctgggaattgaactcaggccctctggaagaacaggcagtgctcttaacctctgagccatctatctctccagccccatagtacagtttcttaaagaatacttgtacaaaactgaaattgcttccatattaaaggaagtaaactccctccacccccattatttctttatttttgaggcaaggtctccatagtgttgccctggctgtcctgaaactcactatgtagagcaggctggttttgaactgctagcgatcttcctgtctcccttgtgtgtgtgtgtgacttaaccagtcacttgttgagttgtttgtcaaggctcacattcacaacctgctgggggcacgccatgcctagagccagttctcagtctcctcagatgcccacctgagggagggctggccccacccctgactgccccgtcatcctggctttggcacgcaggattacattgctgtgaaggagaagtatgccaagtacctgccccacagtgcggggcggtatgccgccaagcgcttccgcaaagcccagtgccccatcgtggagcgcctcaccaactccatgatgatgcacggccgcaacaacggcaagaagctcatgacggtgcggatcgtcaagcatgcctttgagatcatccatctgctcactggcgaggtaagcttcgcggacacgtgccaggtgcagcgcctatgacgctgccgccttgttttggtggggttggggtggatgtcaggctcatggccctcctttctgctagaaccctctgcaggttctggtcaatgccatcatcaacagtggcccccgggaagactcaacgcgcattgggcgagccggcacagtgaggaggcaggctgtggatgtgtccccactgcgccgagtgaatcaggtctgtcagaggcttgtgacaggaaccaccagcacgagtgggtggagttctgtcttgcatgttttacccaagcctcacttcctccaggaaaccttcctggatttccaccctgtatggggcaggtggagccccagccttcctaggtctggctcatctcattcctagtgtagttttgtagccggtttgggttcttcgtttgttttaactgtggtccatttatgaccctgttgcatggtggtggcacatacctgtagttttagctactgagaggcacaaggtggattgcttggtgcctgagcaccatgaagtcaagagcatctcccactttgctggcaagtctcttgttagtaggggcccatgttttcttagccctgtgtctgatcagttgtgtgacaggaagtcctctcccttgtatctcatctctggtgacagcgtgtagtgaaaggctaacatctgtagaggtgagtcccaggtcacagggaggaccaggagccttctgtgacctgagccctgcctgtctttctaggccatctggctgctgtgcacaggagctcgtgaggctgctttccggaatatcaagaccattgctgagtgccttgcagatgagctcatcaatgctgccaaggtgggtcagggcccaccggctgggttgggtgtcaggggcttatccaacgttcagagctaaccacctcttatccttgcagggttcctccaactcctacgccatcaagaagaaggatgaactggagcgtgtggccaagtctaaccgctgatttcccaaaagctgcctaataaactgtgtgccctttgggacagttccacctgcctgtgtgcttgtctcattgagggggtagggtgtctcccatggctataggggatgcttaccttcctggcatggtgtttcctcttggcaagtaccgttcaggactactgctagtcacagggtgtaagtccagtgcctaggaatgaccagaagtactagggataaggggggtgcattgttcctaccctctgggcctgacacatgttgctctgatatggggaagggctgggatactcaagatccagagtgtgtacaggccactgaggtggtatatcaaatagtccctgtgttaagtgaaattatgatggatccagttacttcctcagcatcatttatgtaccgacgtcacatgcctcagggagcccagtttgtagagtggtccatggtccttgtaccatgaacttttagccactcctgcatccagtataaatcgagtttggtgttcatcctggtgggaggggcctggaggtggggtgagcagccagacaggtttgacaggtacatgggaacctggagtgggctggcccaaggtcaggtgccctcctccagggaggggcacttaacctagtagcagacaagccagaaattggggtcacaacaggagggactcaccaggatattccacagggacaggcatcaacaggtaaggtgccctgtagactggcaggtcgcttctgtctgaggttggctctcacaccctgggtttcctctttgtttctcagctattaggtacctcctagtaagggatctggttggtggtccaggtgacaggttctagtgaatgctgcctgagaagtagttctccaccttaatgttgtgaccctttagtacagtctcatgtggtggtaaccccccccaaccataagattattttagttgttacgtcataactaattgtgctactaaatttctgttactctggtctttggttgctcttgttaatgggatacgacccagaggttgagaaccttctgcctggagtctccttgttccctgcggggctgttcttagtctaggggctgttcttagtctagttgtatcccccgccttgcatcatcacccctaaggaggtgggtcctccaactctttaaagctgcttcaggcttacctagtttgtctctagattactggggacagcgggtctaaccaaggacccctctctgcctccttggacctaccctacgtaactattttccttgctcctctctgaaatcttggcaaccggccccagcctccagatccctccgtgcctgagctcttctccgcataggtacaatctggatgccgtgtcctcggccgccctggctccgccgccaccaccgagcctcccagggctcgagccccggctcccctggcaccctgtccgcacccaggtcccctagccgaggtgaagacgaggacgcggaggaggaagagggcgatggccccccgggcgacgaccccatcctgccccccgcgtcccccatggagtgcctcatctgcgtgtctcccttcgacggcgttttcaagctgcccaaacgcctggactgcggccacgtcttctgcctcgagtgcctggctcgcctgtcgctggccacggcgggtggcggcgacgcagtggcttgccccatgtgtcgcgcgcccacgcgcctggccccgcgccgggggctccccgctctgcccacgcagccggggctgctgccccgagacgcgggcgagccaccgccgcgccagggctccgtgcgcttcgaccgccgccggggcctcctgtacctgcggccgccgccgccgtcccccgggccacgcaagagccgcgcggcggcgcgggccccgccgcctccacccccgctgcgcctcggccgcccgctgtcccgtcgcctgtccctgagcagccccacctgggccttcaacgcggccgtggcgctggccgtgctggtggccgctggccttgtcgtctccggcgtctacatcttcttcctcatcccccatgtcaccacctcgggccttgcgcgacctcaggtcgtggctctggcccccgagcccggcttctggcaaccgccgcggcccacgcccgtggcaacctggacccacacctggataccgcgcccgacaaagcctgacctggacctgggtgacacccggccagggaccactaccaaggatgctccagagcttgaggaggcggccaaggacgcagcagagacccgggatgcgccggcccccgatgatgaaactccgaaagcagagaccgacctgggctgggacctgcaggcgcaggaggatggggaaagggtgtgaccatagcaaggacagcttccgtgctgcagccctgtctcccaacccgaggatttcggtgtcaccctggagggcattaacagagtgcgtgtctccacttgggggactgggaagggacaaactctctcactggagtcatcctacaagattcctctgagaatgtctcccacggccatctaggggaaggtcccctggccaggacctttgtaagggtcctactgacaattacttctgaaccacatgtctgtctgcgtaggtctacttggggtacctacccctgattctcatctctgtggaagtccagctggcctctcccgcaatggcatctatacaggactgtgtcgaggcactttagtcttgatcttgatgggatgctgttagaagcacttcatcaccacagcccgccgagggagacatccctggtcagctctggggatgaaggatctggtccactcctcctttggactcaccacagtgggactggggcccccatctttggagtccaaaactgttgttactgttctgatggcatgtcttgctgcccacagctactcagtatgtttcagcacctgcacacctgaccaggactcagacttgggggggacatgggtggcctggctagggcccgggagggccctgacttctgaaaactccttcccatttgggaagtaaatcccaagctgctctgggagtctcggtgtctcttccagactctggcgtctgggacccactcaaataccttgtgggacaaatgtggtcatcgtcctgaaatagcagaagattctggccctccctagctaatgagagatgctggtcctgtccccactgaaccccactacccccatgtttccctttctccaggggccccctcagctctacccagccctctctctatgcctcagctgaaattgaaacctttccagtgtccaccactatggaaggtggctcctgcctttcttccaaagtcttcttggctcagacacagagtatgataaaggcagcttttctctgcataggctaaccacaaacctctgaaacccccagtcctgcctcacctcatctggcatgagatggcctgtgttaagggtgggcagcattttccagaatgaaatgtgatttctacgtatccggaggcttctgtgtggtttatttacacgcgtgtcctcagcactaggcatcagtggatacagaatggttggctggggagtgacagcatcagggatggcccaggggcagcctgggaatgcccgtgggcactccaggcttgtgagctcccagctgccaggggcactgacatgcctgtgggaacaactcagctgctgcttccaggtaggaatccagaggaagaacatcagggaaccaaagggtgtgtcttcccagaccagttcttggctcacacctgagtgccaacatcacccacagggattgcaaccaatgtactggatcactgggaaccactgcccagctcacaggctggtccagcgggagcgcagtgggttttcttagttttctctggctactgtaaaaacttatccccagtaccatgtcttagaaacacacactttacctcccagttctgcagtccagaagcctaagtgtggtggcacagaactgtaaccccagcacttgggaggtagaggtggggaacaccaatagttcaaggccactcttagcttcatagtgagttcgagcaaggccagccaggttatgagagatcctgccgtaaaataaaaaatcaataatcaatcagtcccaggtccttctgaagactctgggagaatctatttccttagatttccagcaactagaactgccttcctggcttctggtttcctcaaagccagcaacaaccaggtcagcctggtctacagagcaagttccagagacaattcaccaactctaggggtgtgtgtgtgtgtgtgtgtgtgtgtgtgtgtgtgtgtgtgtgtttgtgtgtgtgtgcattgctatacagtcattttttaaaatttttatttattttatttattattattatttggtttttcaaggcagggtttcctctgtgtagactggctgtccaggaacttaacttactctgtagaccaggccgacctcaaacttacagagatctgcctgcctctgcctcccaagcacttgagagtaaaggtgtgtgcatcaccctccctgcttgaattttttaaatatttatttatttatttatttaggttttgtgagacagggtttctctgtgtaccttttttggagcctttcctggaactcaatctgtagactaggctggctatgaactcacagagatctgcctgcctctgcttcctgagtactgggagtaaagtcatgtaccaccaccatctggccctgaatttatatatttttaaagattttatttatttattatgtatacaacattctgcttccatgtctatctgcacaccagaagagggcaccagatctcataacggatggttgtgagccaccatgtggttgctgggattgaactcaggacctctggaagagcagtcagtgctcttaacctctgagccatctctccagcccctgaatttatatttttaagacaatttttccttgagttttccaggctggccttgttgaacttagagtcccgcctttcatgcctcagccttttgagcagctggggttcgaggcctgtgctggaattctagtctcagcctcccatttttagatcctttatcacaactgcaaatctattctgccacataaggtatagtgcagggattaggctgagaatgtttttggaacccactattcagcccagagacgagcccccctcatcctttctttccgtcatcccaacctgggtgagtgggggtaggcaagagtagacttggtttggatggaccagaaaggggtctgtggctggcaatgcacaggggagggagagcaatctcagcctgatggtggtccaggaaggctgccttaaggaaggagcccagggctacaccagagatagctaaacttagacatcctcctgcctctgcctcccaagtgctggcattaaagtcatgcaccgccagacctgacccgatattagctcttttgtttttgttttgttttttcaagacagggtttccctgtgtagccctggctgtcctgaaactcactttgtagaccaggctggcctcaaactcagagatctgtctgcctctgcttcccaaagtgctgggattaaaggccagtgccaccactgacccgcagttctaggtcagctcttaataccatcaaactcaaccatctccaagcccagcagcttagggtctggcatctcacacagtctgttggattctctgcatcagctcacattgcatcagctcacacacggctcagctggtggctctaactggcttcatgaggtttccattaagcgtcccacgggaacaacagacatctgaagactcaacagcagcagcccaaggattctggtccaagccgcctgttcacgtgactcccagtctctcatcacatcaacctgtccgtggagctgctggagcacgctccccacgggccagctggcttcctcccaaaacagtgagccaaagaagaaggcagaagaaagccacagggccttttgaacctcatcacaaattcatactttgtcatcttcccaatatgtttctaaagatgcgatgatacctgtgccaggatctgtctcagagtctgagtgactcactgtgacctgccacctacatcactgagtcaactggtcactttagtcagccaggtcttgtgtgctactttacagtaaagggttaacttagcaggcctggattgctcagaccgtgcacattccagagagatctggccctcccttcccgtgattctgggagatcatctctgagccttggaatatcctgcctagtaagtcttgtgtacctagtggtatagagtggcaatgtttatggcatgagccttaggctacactgtcaaattgatctcttgttccagagctttcaa

SEQ ID NO: 44 - DNA, 22866 bp, Cricetulus griseus
  >scaffold_64 dna:scaffold scaffold:CHOK1GS_HDv1:scaffold_64:397437:420302:1
  misc_feature 13092..13191: /note="n is unknown"
  misc_feature 18917..19016: /note="n is unknown"
gtatgagtgtgagcctcggcgagaactcgggcacgtcccgaggactcagcaatgccctcgatttgcagggctgggtgaccgggagccgaggtcgcgctcgggcactcaaggccccgtgcaccaccttcggggctgcggggcggaggacggaaggcactcgtagacacccgctttaagcgctgcccccctcgccatccctccctggggtcccgcggggacgcccgctaagcgaaaggacagcgctccagaaggccaccgtgcaacctctagcggagcaaagcaaacgtctgcagggccgtggcgggaagtcacgcctccgccgcgcacacggcccgaagcagctcttcatctgggatgtgaacggctcacacgctactgggcctcacagccttctgggaaatgtagttccaacccggcatccggcgggcgaggaccaagcttcgggttctccatggcaacgctcaggctgcaacgcagagggcgttgaaaaatgcgagtcccgagttaaatggcctggatgtggattaagtttcattcggggccttccttttagagaatcccagcaagcgcccagtgccccagctccttagtttaatgacatggagtgccctaattctacttaagcagatcctgacccaaaggctttaaccatcgttaaagaactggctagtaattcaatttcacaggcatgttagaaacttttaagtttcctagtgtggtatatgtgtatgaatgtgtatatagagatgcatatgtccttggagatgagaataggacgtttggtgtcctttgagtcctgttgccttataagacagggtctctcactgaacctgaaattcactgttctggctggccagtgaaatccgagattctctatctccacctgcccgaactcgtactgcatcccgagtgcagtggttacaggcatgtgtagccatgtctggcttttgggtatttatgtggaggccaaaggataactcacagtagccagtccctggtattgaactcagatcactagtgcttggtagcaatctcaccagcaagggtgctgaggatttttttttctggtggggagggttcaagtcagggtttttttgtgcaacagcactagctatcctggaacttgctctgtagaccaggctggcctcgaactcatagagatcagcgccaccaccactgcggctttcttctctcttcctcttcttcttccttcttcttctttcttctcctccttcttcttttcctcttgtttattgattatgtatgtgttttgcctgcatgccagaagagagcacaagatctcattacaagtgtctgtgagccaccatgtaattgctgggaattgaactcatgacctctggaagagcagccagtgctcttaacctctgagccatctctccagccccactgcccagctttgaaagaaagaaaaattacacctttcaggcagactctacagatcctgtggtagtttgtagaaatcacctcttggtttttcctttcttttcttctttcttcccttccttactttttttttttcctttccttttggttttctgagacaaggtttctatatataacagttttagctatcctggaactcactctgtagaccatgctggtctcaaattccctctgcctttggagtgctggggttaaaggcttgcaccaccacctcctggcctgtcttccttctttcctttcttcctttctttccatctttctttctcatctaccactgagctccacccccagtcctctatacttctacattttgagacaaactctcactaaattccttaccctggtcttgaactcactacacaactcagactgtgaatttgtaatcctcttacctccccctcccaaatagctggtattacatgcctgtacccccaggtgtgcttctgttgttttgttgtggttgtgataatcctgaaatttttaaggacaaagaccaaatccatgatgatctaattaaaacatgctttattttagaggtgtacctgagactggccagccagctgcctcaccttaaatcaggattttagagagcagccccagatgtgaagaagacaaggttttttatagctggggtgggggagtaaagggcttccaaatgagggatttggcaggaaaaataggtgtggttacaggaccagaacataagcataacaagttagccataactacctcatgatgttgggagcatagtatgaatctccagagaaacctggaatgttaagcatacaggatgttctttctaatgggaaagatgaaaaaccagttcttccatccagaaacctgagaattggaagtgattgacagcctggtgatctgttatctgtcaggccaagccatatcaagctcttacaagcaagaccagaagtggctggtgatctcagcttccacaaccatggccagaggtggctaatagcccaaaggacctctatactatctgtctgattagctcttatgctagtacaggtagcctatctctatttcttgaaagaaatacatgtatcctgagttgagtttcaatgtaattacacttccttgtgcaattgggattgtattacaccagggaacattttttttccaaactatactgggctttaatacattgataataaaccgccaaagtctgatccaggttaatgaagtcaatctgcacccagttttcattcattttttaaaagatttatttattatgtatgcaaggccagaagagggcaccagatctcattgtagatggttgtgagccaccatgtggtgactgggaattgaaccctgatcctctggaagagcagccagtgctctaaacacctgagccactcaccagccctgggttttcattcttacccctttgcatgttttgatttcctgtaggacacctgcagagaccccctcatcctgcaacaaagacatgattgccatttctggaacaagcagtacagaacctttgtatttaaaattacagttggtttcagctgggcgttggtggcgcacacctttaatcccagcactcgggaggcagaggcaggcagatctctgtgagttcgaggccagcctggtctccagagcgagtgccaggacagcctccaaagctacagagaaaccccgtctcaaaaaaccaaaacaataaaaagtaataaaataattacagatggtacatagtccagttcttgagaaacaaaggtttagctgggtggtggcacacgcctttaatcccagcaaattgggaggcagaggcaggtggatttctgagttctaggccagcctgatctccagagtaagttccagaacagccagggctacacaaagaaaccctgtctctaaaaccaaaccaaaacaaaaatctccagagagagtggcttgatcataaaaaggaatgaacctagtttttctttactataagatggctttaaaacctaaaatggaggcaggctggttcttcagctattgggttttcatattttaaatatttaatttttaatttatgtgtatataaaatgtgcctgcatgagtttatgtgcattgcataggtgcagatggacttagaagccagagggtgttgggtcccttgacactggaattacaggtagttgggagaagcctgatgtgagtactgtgaaccaaatctgggccctctgcaagatcagtgagtgtcaagccatctctccaaagccttgttttgttgagttccatacagcctggacttcgatggagcaaccagctaccctgggacgtggcagcaccccagctttctcaggtcccctaaggatggtcaatgccccccccaaccccgtgtcagtaggaagcagtcttgagaatttggcgcccttattccttaacctgccacttctaacaccccacctttttaaataagtaaaggtgggaatgaaaggttcagacattaatgctgacccattctacctcttttaagagatagaccccaccctctgacaacaggtggggcactcaaggtgaggtgcccatcattgccacatctgacctgttacccttcacggacctgcgtgaggacactgcgcatgaatgaagcctcagtgcccatgctcggctctccctttaaagcttgtacctgtctctcttcttcctctctttctctggtgaccaaccatgacggtcagccattaactctgtctttcttctctcttactctgtcctgctctgttcttctatttctctctcgctatctctcccgtggtatgacaaactatcgttaatgtatctctatagtctcatgtctcatctctctcgtacttctaattttttaaaagattttatttatttatatgtatataacattctgcttccgtgtatgtctgcacaccagaagagggcgccagatctcataacggatggctgtgagccaccatgtggttgctgggaattgaactcaggacctctggaagagcagtcggtgctcttaaccactgagccctctctccagcccaacccttctttattttgagagacaagcatatgtagtgttaactcaataccaggaaaataagaatcctaaaacaagcttcatcacatggtgcaatacagaggggggaaataccctttactgtccttccacaacaggctcagtctgcactgagactgccctgcctctccagaatattatgtgtcacagatacttagattgatcccaagggaatgaagactcagtatggtgatgtgtgggcaaaggcaagagctaggtaggctcaggagaagcagcctaagtgtagaaaaatgacagttaatctgtgcaagggtctgaacataagggacagcagaactggccttgactcttgttttttttgtgtgtgtgtgtgtttttgtttttgtttttgtttttggtttttcaagacagggtttctgtgtggctttggaggctgtcctggaactagctcttgtagaccaggctggtcttgaactcacagagatccgctgggataaaaggcatgtgccaccaatgcccggctcattgtgatatttttatggtttgttttgaaacagagtttctctgcgttaaagctcaggctgtcctggaatttactctgtagaccaggctggcctcaaacttacagagaggcagctgtctctgcctcccaagggctggcattaaaagtgcgtgccaccacccccagctcattataacgttacaaaatatgtattttttataagagtgctgtatacgcatgtatgcctttatgccagaagaaggcatcagatcccactatagatggttgtgaactacattgcctgctgagtgctgggattaaaggagtgcaccaccaggccaggctcagattgggttttgaatttggattgggtctaaagttgctgtccccccttgaaattagttgtttttatttcatgtgcactggtgtgcatttgcctgcgtgtatgtctgtgtgaggaactggagtcacaggcagttttgagctgctctgtgggtagtgggaattgaacccgggtcctcagtaagggcagccagtgcccttaaccactgagtcatttctccaacacacacacacacacacacacacacacacacacacacacacacacacacacaccacaccctttccgttttgctttgttattttaggttttgtttgtattttcaagacaactttttctccccgtgtaacagccctggctgtcctggaactcgttctgtagaccaggctggccttgaactcacagagatccaccctgcctcccgagagtgctaagactaaaggcggcgtaaaccagcacgctggctgctgctctgcctctcaaggcgcggttcttgctacgttttctcttttgtgttagtgtcgcctgcctcctccggaaaccgcgaagttagttgcacttgggcatctctgtagttttttttttttttggtccggggccgcgtaccgggcgcgggaacctacccaggagaccctgatgatgctcagacaccgtgcaaaacctgacggtggtcgtaaatctcttccctgaactgcgctgcaccagggctgggggtgggggggggagtgggggagagtcggggggaggggtggggttgggagggtggggaagatgcttggccgtggccatggttaccgggaaggcacagcctgtcattcaggcaagccagcaggaactacgtttaccccagcatcagtagtgtgcactggccagggcgagccgcggaggcggggcttccggcggtccaggttgtcagtttgcagaccggcttcgggccagccacaccggtgatcgcgattggcgcgtgagggaccgggccgatcctgccttcttagaggtgctgggggacccaagacttgctggggtagcaagtgaggacggtcctcgcagccgcccgcttcgggccgtggctcggcacgcgtcggctctgcaagtcggaggctcctcctgcgagcctcagtttccctccccccccacctaccccccccccggccccctgtggactcgtaggtgacggttgagaccgttagggctgttcccggagccacctattctccatcccaccccaccccgcctccccagctgcaagtccttcagcgggtcctctgggcgtaccacgccctagtctaaccgggaaactgaggccccggcgagctgcgcgaggccgtgggcggggacgggctaggcccgggtctcccgcccgccgggccccgctccccctgcagattcgaaccgcggcgacctggccactgacagatgcagcgccggtgagtgttagagatccttccaccgacccaccgggcgtcccggcttgcccgtcttgcttgcttgtttgcagccgcatcgcccaggtcactgaggctggccggtggtgaaggaaggctcacagatgacagccaagaggggaagggatgggagaaagttaaagggaaggacccaccgcctgcagaagccaaggcagagactttttatagtttgaaggccgtgtctcttcttttgaggctggccagcttcgagttagcggtgtcgccgagaacggccttgaatttctggtccccctgcctccgcttcccaagttctgggtttgcaggcgtgcaccaccacacctagttcgtgtgatactggacgggacccaaggccttgtgcatgccgtacaaatgctacagaatgagctccattcccagtctggaacttagcaacttagatgtggaatgaacgaggaagagagggtcttgtggggttgaaattttaggcagagaggttagggcttggtcccaaaggcactggaagacacagcgtgctttaaacatagactgggccgtttcccagttaggattttttttaaaaagatttttttttaatttctaattatgtgcatttgtgtgtgtgtgtgtgtgtgtgtgtgtgtgtgtgtctgtgtgtgtttatatgcacatgcgtgtcggttcccctggagctgagttaacaggcacttgtgagccatctcctctaatgcagatgctgggagctgaatccatgtcctctgggaaaagcagcaaacacccttagccactgagccgtctctcatcatctcatcccagttttttgttttgttttaagatagtttcactatgcagatgtagctggtcggcaacttgatatgtagaccaggctggccctgaactcacagagatccatttgattctgcctcgtgaatgttagtattaaaagcacacaccagccgggcgttggtggcagcacacgcctttagtccctgcactcgggaggcagaggcagaggcagaggcaggtggatgtctgagttcgagaccagcctggtctacaagagctagttccaggacagcctccaaagcctcagagaaaccctgtcttgaaaaaccaaaacaaacaaacaaaaaacccaaaaacaaaaacaaaacaacaacaacaaaaacacataccaccacacccagcccctcaagtaagattttaaaagtatttttatctttttctgagtgtagaccagacacggaggaggtatcattatgccgagcaaagtattaccctcaaaccccattgggatgacggtgggccctggacctgattagcaacggtggtggttaaagtggctgaattatgggtagatatgctgatgcgtcagggttgagtgtgaactgggttgtgtgtcaagaactctcccacttatcagcttaagcccctggaacgatggaaccactgtagctgtggaaaagaccaggagtgtgtgatatcccagagtggactggtttggcgggcctgaaggagtaagacatgtccagttaactgatcctggtgtctggcgcccggaacctgagaattgaagagggatcgtttcacagacttgatcaggagtggccactcaggatttgagagcgatgaagaaaggcttgtggtgtgtgtgtgtgtgtgtggctgtgagaggaagaatccagcaggtggctgagcaaggggaggagtcgatgaagagcagaaaggaaatgaagcactggtatggaagaaagactgacttcctgtatgtctatggagttgatgaggccacccccacctcaccccacagcacagtgactgggattatctgtttatgtttgttctgaagggccaactttgtgtgtatgttgtttggtttgggtttcttttccttctttcttttttgtttttttgagacagggtttctctgtttaacagccctggctgtcctggaactcactttgtagaccaggctgacctcaaactcacagagacccacctgcctcctgagtgctgggatgaaaggcgtgcaccatcatcacccagctagtgtgtgtgtgtgtgtgtgtgtgtgtgtgttgagacaagatctttctacattagccctggctgtcctggaactcactatgtagaccaggttagccttgaactcacggagctgtgcacctgcctctgcctcctgagccagtactacagggaaggaagagaagcgtcttgagaagcatcaaggggagatagccactaggacaaggagctggctcccgcctcacacagccatagcatagacactgtcttattcttgctgttgcagggcctgatggcctttgaggatgtggctgtgtacttctcccaggaggagtgggtgttcctggatgcagcccagagggccctgtaccgccatgtcatgctggaaaacttcgcccttgtagactccataggtaaagccctgaatcctccattggaagcaaaactgggaccaggtatggcagccagctgaggggaccaggtttgggggccattacaactgtcccctctccttcctactgtctatgaggagggccctctgtccatgggccatgtgaggaaggtttgggccctgaacatatgcagttcgataagctcaaccatttcctgtatccctgaggtgctggctggctatattctgtgcccggttctagccccttcatttggagctgcttacccagtggtttcttatgggaacccttgagctggccctgtggtcctcctgtgtggtatgacatttgggtacgtagattacatagttgcttgtccatgatatcactcggcatcctgctctttgctggggctggactgtcccaagcttggactggcctcacacgctccgctccttctcccttcacaggactctccatctcccggcctcgtgtgatcatccagctccagcgtggcgaggaaccctgggttcccaataggacaaatacaggcccaggcaggggcacccgcaggagacccagccttggtgagttagttaggctccgcctagggctactcctttctcccctcagacaccttccttttctgtctccagtctagctcccttccctttctgagcccttttctcatcccgtggcctttccttaaaggaaaaacttgaaggacacaggtgctgcgttcacgcaggaaacctaaaggccctcccttgcctgtgctgtatgtgtgtggcatccccttccacatcgggctgtcacattttcggggtcattccttcttcccaactgttgcctgagccctctggccaggctgttcctggcactgcgcacacagcactggccagtacactgctgtgtagtgtggggataatgccaggcaaaggcagtcagcaaaaggtattgatgagtactgcagagacgcaagatgagcacaagcagaaagcaggctagcccatgcgtgtttgagagaaaggcccccgggacagccagtgcggagtcttggccacggagagggagagccgttgctgtcaggagagccctaccaactactcccagggtcagcctatgcctctttttccccctagccttttacaatcacttcatagggtcccactgactgcccaggcactctgctgtggtcacttcctggccagatgacccaggtaactaactttcctctgccttcaggatccaattacaatgccaggggcagacacatgcctagcgatgcagcgcttccaggggccacctgtgacagtcctgatgggatacctactagtgcccttcctcctgctgatgcctgccgggatgcaaaagtcctggagggccaccagagtgcctccctgtctctgcagagaaaacctacaggggtatctgtgatctactgggagcagctactgctaggtcccagcagcagtgaggcaactgtgagcctgcggttgacctcccctgcggggcttcctgaagatggttcatccagagtaaaggccttctctgacatcctggccccgggaaagcagccacgcacggcagcggagccccaaaagccagagatgcagctaacccctgggagagtcttcccaagcatcccagacctccatggggtggaggagggacacggaatgagcggggcttggcacgaacctcagagagaccccagtgttctggagcccccaatatgggatgagctaggcggtgctctccagactggcccaggtcttctctctggggacaaaccttttgaatgcagggcatgcaacaaagtgttcgtgaagagctccgacctcctcaagcacctgcgcacccatacaggagaacggccgtacgagtgcgcccagtgcggcaaggccttcagccagacatcccacctgactcagcaccagcgcatccacagcggggagacgccctatgcatgcctggtgtgcagcaaggccttccgacacagctcctccctggtgcgccatcagcgcatccacacggccgagaagtccttccactgcagcgagtgtggcaaggccttcagccacggctccaacctcagccagcaccgcaagatccacgcgggcgggcggccctacgtctgcgctcagtgtggccgccgcttctgccgcaactcgcatctcatccagcacgagcgcacgcacaccggggagaagccctatgcctgctccctctgcggggcagccttcagtcagggctcttcgctcttcaagcaccaacgcgtgcacacgggagagaagcctttctcctgcccgcagtgtggccgtgccttcagccacagctccaacctcacgcagcatcagctgctgcacacgggcgaacgacccttccgctgcggggactgtggcaaggcctttgccaagggctcagtgctgctcagccaccggcgcatccacaccggtgagaagcccttcgtgtgcacacagtgtggccgcgccttccgcgagcgccctgccctcatacatcaccagaggctccacacgggggagaaggccctgcagaggccccggggtggcatgcactcccaagccaggtctctgggggcatccttggaaggcacacttcccaaggccaccttaggcccggcagcagtcccaaagctagctgagacctgaggtcaaagctatgccctcgcacgccgcctttgaatccctttcacccactgttgaaaagcccgtgtcctcagccagtccaccgagaagcctggttatgtgaagaagacttgccagtcagttctatttacagatgacacgatctgctgttcagccacaattcacacctacaccctgaaagaagccattctggaaaggcatccggagtatgcatgtaccctctgggactggtggagcagacaaggactgcccccagaatcagggagtgacccacagacattatcttcatgttgatcagcgttccctgactgtggctttgaaaacaggaaaagagcaggcagtagatagagacggccagaggaatctgcctgggctcaaactagcagctagagatatatacccccagggctcagtgcattcagtcagtttccttgctgcgagcctcaggcaaataaatggtttgtttctgaacctcggctttctcctgtgaaaaaatgaaaagagaaggagatttgggtcaatggaggggagtattgaaaaaaaaaaaacactaggctgggtgttggtggagaatgcacgccttaatcccagcactcaggataggcagaggcaggcggctctctgtgagttcaagagcagcctggtctacaagagccagtttcaggacaggctccaaagccacagagaaaccctgtctcgaaaccccccaacacaaacaaacaaaccaaggcagaaagtattaaacggatgtacacagacatgccattggatgtcagcagagatttggggacctggctttaatcagggttctgagaggggccataggataaacagtttgtctgcagcccagtgtaaataggctcatctatgtccccttggtggccacaggtgtttgggggaggcctggagacctgggcagagcaggactgccccagagcagccgttctgattagcctctgtggatcagggtgtgggaagggtaaggtggggagacagaggcattgctgtgagggcacctgctcttgaggctgagtgcgtgtgcagagttgactccagccctgtgggaactccagggccatcacctcaagacccttgcaggtttggcagtgtctacctgtaaccctagcacttgggaggctgagactgaaggatctggaattaaaaagccagacttcactgcacagcaagtttgaggcctgtatagggctactgagacagtgtgaaaaaaaaaaaaggtcaaatgtgctgatacctttaatcccagcnnnnnnnnnnnnnnnnnnnnnnnnnnnnnnnnnnnnnnnnnnnnnnnnnnnnnnnnnnnnnnnnnnnnnnnnnnnnnnnnnnnnnnnnnnnnnnnnnnnnaaaagaagacaaaggtatctttgctgggagggagaggcaggtagatctttgtgagtttgaggccagcctggtctacacagagttccaggagagccagggctgttacacagagaaaccctgttttggaaaaccatgaaagaaaggagagagagagagagagagagagagagagagagagagagagagagagagagaaagaaagatcttcgaaggctctgatccccagcaaagagaacactgagcacagtactgccttcccttggtctagccacaaggaacagcaggaagttgtaatacacagaagcctttccaatgcagcatctgtggaacatgcttgcaaaaggcctttgcttccctgacaacacattgtgaagaaagacacttgagatgtccaacaagtgggaatgggctcaccgagaactcaaatcatgttaatgacaacaaatatcacatggaaaacatttcatgtgtgtgtgacaaatggaagatcttcagccacttttcaaactaaggtcacatcaggaagatcatagggaaatgtcacatcctacctgtagtcaatgtggaaaagcttccacctgaaaaccctcagcggttcggcgccagagagttcgcagtagaggaaggccgtatgagcgtggccagtgctgaggaagcctttgcttgaagcttccatgttgtttggcctcagaacgttcacaacacagaaaggccttctgaatacaactggtgcaggaagagtctttggttccaattttgttgagcaccaggatatacacaatggagaaaggccttacaatgcaacgagtgtaggaaagccccatatagagctcctgccttgttggtgaccagaaagttcccaacacagaaaggcctccagagtgcagtgactgtgggaaagcctttccacaaacccccaagcttgttctgcatcaaaggagccgcactgcagaaagacccgataacctcaaccagtgtgggaaagccttcagtcctctctctaaccttgctccacaccggcgaattcatgcgggggggggggggggaagccctatgaatgctcagaacgtagaaaagccttcagccaaagctctgccctcattcagcaccagaaggttcacaggagagcgagccttacaaaggcagtgaatgcaggaaagccttcagctatagctctaattttgctaagcactggaaagttcatatttggaaaagggccttgagtgtggctggtgtgggaaagtctttggtgaaagccccatcctcagtcagcacccgagaatctatactggagaaaagcctacacattgcagcaaatgtggaaaagcattccgctatagcgctaacctgtccaagcaccaggaaggacatgctagagctttccaagtgcactggatttaggaacacctttgatcaaagctgcagtttctctcagcaccagaaatgtcacactggaaagaggtctttaaaaatgtggccagggctggagagacggctcagtgagggcggggtttaaatgagtccaccagacccaaggtagatgataaatatgtatttattaggaaagcacttacatagataaagagtaaataatccccatggccttcctgctctggaagatgtcgtctctgtgcgtcctatatctccgaaacctaatgggtcacctgaaatctgcacctgaaaacacgcccaaagggtgtggccaccactacaagttcactggcaaggcaagatgccactacagctcagcagttaagagcatgggctactgctcttccagaggacccaggttcaattcccagcacccacatggtagcttacaactgactgaaactccagttccaggggatctgatacctgtacaccaatgcacagaaagtagagttaaataattatatttaaaaatgtggccaacgtgggaatgtactcagctagagcctttctcctgccttcattataaaaggactcatgagaaacctagagtccaaagaatctttgtgaggaagccactcagattatggcgactgaaacagaaacctatgttccagtatccctcatggggagagtgccaatgtgggaagactgaggagctattttacactttcttttctaagtcctttgtcagactatgtcactgccagatgtcatcttacctggaaggactcacagtttgtgtctcccatacttagggaaagccgacctcagtgctctctctctctggaggaagtgaagggagccctttgggtcaccccagttcgcacttggggttcaggttcttctgtaacctaggtctgtccaaggggatctgaactggagtccgctgatgacatccaaaggtttgccatcttgattctggagtctcatgcggcctgcaattgattcgacctgggctccagctaccttcagagagaataacaaaagccttactgttaaagttatcttttcatttcaaggattgccctctgtggggaggaactgaaaaggtgattgggctcttaacagtgtaaagatggaggagtggtcgcctttacctcacaggtgacagcaagatggccagcaccggctcccagttcaggttcacctggatttccttgacgctcaaagtctgggggatggactgaagggcactgtgccccatatatcctcttgagtctaaagctttggaaactgggtggtggagtggaagtccccgatataccaaagggcagcaggggttggttcctttgttctcaagaattcctagagttaggataaagcttgaggggaccttgcataggggcccattgtggatcccatggcaggtgagaatgactgaggcaggggacaaacaggccaggcagacagagcttaagtgataagttttactagaaaagggagggaaggggaaggaaagagaaaagaggcaaagagacagagagacaaagaggacagaagagaagagggagacaggaaaagtcctgtctgccccaggggaaccagagaaagagagagggaaagaaagagcggaaatagagctggaaaagacagaccctaagagtgtagtgaaaagccacctgtccggctgtgcagttgcatagctggggggcacagtatcgtgtgaaataaacactcgggacggtctcagaggccccattcatgtcaacgcccattagctcagtaggactggcaagaggcacagccagccaggaaaatggccgggagacggtatgaccccagacctggagtctttccgagcttgtggccctcttggtaggctcacacatctccataggcgatggtggacacgctaggggtgaaaggttcaggcatgatgctggccgccccctgttacctggtggaacaggcagtagtaccctggtcagcccagggttccatgggaactaagtctacacgcaggtgcagaggacccctttaaaagacagaccctgcccatttacactctactctcttttcttctctgtctccttctgcttctcttctctctctatggcgacaggccatggcggtcagccatttaccctgtttctcttctcctttagtctccctactctgccaggcctataataaactggttaatatgtctaatatgtctcttagtcgtatgtctcattttcttctttatttctaatttaagcaaaaatttaacaagtgcctggtacctgtggaagccagaaaagaacaccaggtcccctggaaatggagttgtggatagttgtgagccgtcagttggcactaggacttgaacttgggtcctctgtgttaggtttccaatccaaggctgacgtgcttattaaacatataaaatgtagggtcagaggaaacactgaaggaagaatcagaaaaaaatatataagagctgaaaggttcaggcatgacgctggcctggccctgttagttacctggtggagcaggcagtaccctggtcagcccagggttccatgggaactaagtctgctttaaaagacagacccctgcctatttacgctctctctacacttctctctgtactctctactcttttctgtctgcttttctttctctctctctctatggcgaccgtccatggcgttcagccatttaccctgttcctcttctctcttagtctccctactctgctgggcctataataaaccggttaatatgtctaatatgtctcatcctgtgtctcatcttgggccttcctcctcttcttcacttatttattttggtttttcgagacagggtttctctgtgtggctttggagcctatcctggaactcactctgtagaccaggctggcctcgaactcacagagatccccctgcctctgcctcccgagtgctgggattaaaggtatgtgccaccaacgcccggcttctttatctttcatttaaacaaaaatctaaccaggggtcactcactggctgcgaccccgcgacactcacgctgggtggcccgagggccaccgagatcggggctccgggggaggaaggacctgcgccgatgccacggaggccaagcggagcggccgaaggggcgggacaaacgccggaggccccgcctcctcggccaactcccaggcccagcgtccgcccagcgtccctctggcccgccccgaaatgcccttctgggtttccgttgagccgcgaagaggtttctgggtgatgtagttcgcgtcacgcgatcggggccgcagcgcctttggctccgcgatcaccgcgcggggggcaatgaccgagcggcgccctgatggcttctgggaggcagtggcgtggcgttgtcgcaggaccctaagccaatgaaacctcagcgatttggttcaaatccctggagcagcccgcagacccggagggacttccggcccccgtgtggcctcggtgtcacatcctgcggcacgtttcccttgtagccccgctgcggctggccgagaaggctcaaccgccagtgctgcttctccacggcagtcctgcttaactgcaccctgcctgaagcatacaatcttttgttcttgtcctgtgtaaccacgggagttctgtaatcttgccctaccattttcccttataaaaacacccctcggctgaaagcggggactccatttgttccccaacgaatggggtccttgctgcagctcgtaccctcgagtcaataaagaaacctttgtccttgcattcgtcttgagtccttgagtcccgtctccttgttggcgggttcttttggtgttccgaaatctgggcacaacacaacaacaacaaaaccaaaaaacaaaacaaaaacctctgtcctgggctcaggggttaagagcatgtggtttaacaggagccaaaagaaagtgtagttatctggggcatttcaaccctgagtttctagaagagggttgggtactttcctaagggactttacccatagctgcctactggagaacacactgaggggatggttagggtggggacggaaaggccatgcaggcggtaacaacagtcgtttcggtgtgtgcttctggtgactggcaaggagtgcctgtggaattaaatagctgactttggagtctgcttaagttgggccaactagattacctgatgtctgtgaggaaaaagagataccaaggtttacccttgtttggggggaatgcagaagttgggttttgtcttttgagatgtctcaaactggagacatccaaggatggatggcatgcattgtaggcagccgtgggttgggttcagaatagtgaccaagagagcagacctagnnnnnnnnnnnnnnnnnnnnnnnnnnnnnnnnnnnnnnnnnnnnnnnnnnnnnnnnnnnnnnnnnnnnnnnnnnnnnnnnnnnnnnnnnnnnnnnnnnnnaaaaaaaaaaaaacccaacccatcttgcagctatcctctgtagttaagacaccatcccactgatttgccaatggaatcaggcacctctgtccattcaacatcattagttcatgcaaggagggggtgttgttgcaggacccggctgcccaagaccctggaagggcaggttctctgagataggtctcctgatacccgggagacctactcagctcttggatggagctgtgtaatgccaggagggctcagaaccaaagacatctgttgagccaatgagtttcctcgatagtcacaggaacctgaagccgatgtcctcagccttcccggcccctcagacgggggtcaataccatcttctcatcctcaccagcttcctctgctgtgcccctactgcccattagttctatcctccttgcatctgcctcttccaatacccagaactgttctgtgttcccctatgtgtctggtggtccccagcaactatggctatctatgttggtgggcccctcttaacaggcagactgtaaaaatgccctggggctttctaagtcaaaatgttaaactggctaagtttggaagcacctgaaaatattcgaaacactgggaaaaactgaaactggaggatggactgttagagaccaaactaggatgtagaaaccctgtttcaaaaaaaagaaaatccccaaagaggtggtgtcgaacatctttaatcccagcactgaggaggcagaggcaggtagatctctgtgagtttgaggacagcctggtctacaaagttccaggacagccaaggccgggaaattaaagagaaaaggaaagaaaaaacaaaatgaaaacacaaccatacacttagctcttcgctcacgtaagtctacaggtaacaatgggggaaacatgacagtggcacttggaacccagaagtagatgagtcatccttgattcaagggaagccaaatactgaaattgacacgggggtttgtctcatgactttcctgagcagacatacacctacactccccaattagggaaagagaaaacacaaatgaaagatcctaaatcccacttggcaaataagtttattggtgtaaggagtcaggcactatgctggcctgctcctgtcacctggcagaatgcactcaggcagtatcttggtcagcccagggttccatgattccgtggtttgcacgcaggtgcaaaggactcctttaaaaagaaagacctctgtctactttcttctgctctctctttccctggttcccctggggcagacagagacagaatttttcctgtctccctcgtctcttctgtcctctctgtctctgtatctctctctttacctcttttctctttccttccccttccctcccctttctaataaaactcctcacttaagctctgtctgccaggcatgtttgtctctctgccttggtcaacctcacctgccatggaatctgccaagtccccccaggcaagattcccctcaaaggttaccataacaattgaggttacaagaacatgggtgactgaataatcccaactctaatcagttttttcaccttaaaattcagcttgtttgtttctgagacaaggtttctctgtgtaacagctctgtcctggaactcactctgtagaccaggctggctttgaactcagagatctattgccactgcctcctgagtgctgggattaaaggtttgccctaccactgccctgtctaaaattcagcgtttcaaagatcacacacagttgggcagaaggactggtgacccccctaccccaccccaagagaaaatgtcaataccccagtatcacagacctaactatttgctgtataatttctatgcattaatttctaagggcaaggtcagtaggttgccatagaccctctgctttaagatggctgagaggccaacttggggaacttagatcctatctcaaaaaaaaaaaaaaaaagaaagaaaagaaaaaaaactattttttaatgattgcattggccaacccaatataaccatagtaattaagggagttggggctagctcaatggttgttttcctggtaaacattcggctataaatttaaagcccaagtataccacatgattcaatcaggtctaccctgaagcacagagaaggcttgggagccagctaaccttggacgggagccctagaacagagatgcttccagggacagctgcttccaagaggacagctgcctgggaagtcccttaaagcccagcctctccccactgggtgggtatgagagctttgtccacagaatctatgaaagacctcatctcccaagatagttcagctggtaaacccagttgacaaactctacccgcacaactgcttaagagtttcagatgtggagaattgctgctcaccgctagctgctggcagccgaggagggggttctcaggaatcagaaaaaaaaaaccaaaaaacaaacaaacaaacaaaacaaaacagaatagacagatccgcttcaggactgaatgattctatcatggttcagactcttggtatgtggaaacaaaattaacctcatgtgcacataaatttaatagcccttacttgctgtgtgtggtggttcagacctttaatctcagcaatcaggaggcagaggctgcaggatctctcagtgagctccaggccacctggggacttgagaccctacccccccaaacaaacaaataaaagccattaactttattttttaacaatttaactttgtttttaaatgtgcattggtgtgaaggcatcagatccccagaactggagttacagacagttgtgggctgccatgtgggtgctgggaattgaactctggtcctctggaagagcagctaatgttgttaacctctgagccatctctccagcccctcacctcaccccattaactttatttttaaaaagcctttttcccaaaagactttggagagggaaaaaaaaaatgagtaagggccaccttgtctaactgcagcctccaaattaaaagttgagtgtgtctcataatctcagacagagccctccatctccatttgcagtagtaccgctatctaaagagggggtgaccacatggtcacctcctctgaacgcctgctcgcccacccatgggcctatttacttaacggactataacaaaggccatactgggtgtgctcgcccaacgctgcctcccaccgggatcctctggaactcgcacctaggttttctcggccggccgcaaggccacgcttacagcgttgctttggcaaccgcagaggtgcgctcgctgttacctaggagacacacggagcgatgctcccttctcgtagctgagcgcccggctctaattgggcagaacgcctcaccagccaataggagccaggcgcgctgcacacatgcgcaaggaggctacggttccgcagcccgggtccgcagtgggtgagtccttcggctggggtgccaaggaagaacgggtcgccaagtcaggagagggagccccgtccaccaccaccaccacccccggaactctgcgacaccgcgggctccaaaggagaggaacggaacgaagccgctggcgcgcgaggggcccgagaaacgcgcgctcccccttgctgaggctcacgggagatgtagtccgcgcggagggggccgtgcctgtggggccgctgcaggattggccaggccggtagtgagtggcggtggggcgcgcggtgtagcctcccttcccggaagtgccccgagctcctggggcgccaggaggcgtcagaggtgagcgagctgctcgactgggcgggcccagcttctcgcgcccccccccccagctcgaggagcgccccactgcccccagccttcgaacccagaactccg

SEQ ID NO: 45 - DNA, 60442 bp, Cricetulus griseus
  >scaffold_65 dna:scaffold scaffold:CHOK1GS_HDv1:scaffold_65:1291309:1351750:1
actctggagacagacaggtaaatctctgtcagttaaaggctagtctggtctacatagttagtttcaggacagccagagctatgtagataccctttctcaaaacaaacaacaacaacaacaacaaaaaccaacaaactccaggaccaaagccatgtttttagcacaatttccaagatcctgaatgcagtcagtcttctaagcttgactttgcaataggttgacatcctgctttctgcacaggcactgccttggggcacccgctggacttgttgccatgctggtgagtcatacattactactgtaattatgagcggctggtgctgttgcatcatctgtgcatgggagtttaagtgccgcaggctccaggaaactagctgtttaacggtgttctgagcttaataccaagaaacggatcttggcagccaggccactctctgcaccaaaaaagcgagcagaaccccagtggccccactcttacctcttcccttagcatggtgaacaggaagttcatgagtacggcatgtttccgaggatatttctggcacagggcactgatggcctggacaaccaccacctggggtagagagacacatatgagtagcagcccctgacaatcctagtcacagagtccctccttgggcaagactatgctctaggcccaacacaagagcaagaaaccaggaggaacaccaatcactccatgctggggaacacagccctgaggtcccccagggcaggaaaacatggcagtctcagtagcccaagtgcaggtctagctccccaaaccctgcctggcctgcttctctcctgccgtggacattttcacccaatattccactctgttctcttctcgaggtctctttggcaatctcatttcttccctctgctttcttcctgtaactggctcaagtcttcacattgctcttacatcattgctcttgctgcttctaagccccttcatcttcagagatacgattctcctccaactcatcctccactgtccagaggggttgatctcatgtgcaaatctcaccacaccatcagcctatcgatatgccttcatacagcccacaggcagagtagatttctgtccacgtttcacaacccacactctaggatttatcctgctatatcaaaaattgttcctatcattctctgctctgatgaaaactccccagggacacatttcatgactctatttaggttgcactaaaataatctaactatggaaaataccaatagatgagagactgtcaagaatcagggatgagggtctgggaatggagtgtacaagctctgtctaatgatggtgagtctaactgtggcagtaattttcaaaggcatcacatgtgcacctcataaccaatgaaatctgagtaagcactctagattgtacaattgctggtttcttgttgacactatgactatgcgagatgtgggcattgcagttgagagaaatgcccaagaccttttctcttatatatttgcgatctcctatgaattatcttaaagtaaaaatttaaaaagcatgccgggcagtggtggcacacgccttaaatctcagcacttgggaggcagaggcaggaggatgtgggttacagagtgagttccaggacagccaggactatacagagaaaccctgcctttaaaaaaaaaacaaaaaaaaaaaaaaaaaaaaaaaaaaaaaaaaaaaaaaaaaaaaaaaaaaaaaaaaaaaaaaaaaaaaaaaaaaaaaaaaaaaaaaaaaaaaaaaaaaacaaagaaaaatataagctggatatggaagcaggcatctgtaacctcaaccatttgggagacaataaaaggaggactgctccagggttgacactatcctgggttctattgaacctgagctctggaataagaccctgtctagaaaaaaaaaaaaaaactatcacaagcagtaggtctgcagtgaatagcccagcctgtgctgacatctccaaagcatctgaccctagctgacctgtctccttgtctccttggaactctttcccaacatccgatccggcccttgtttctggccccactgccttcctcatccatgcgtccccagcagccgctaatggagtgccagctcctcactgcatctgcatctcaggtcatggcctgtttacacatttgttcatttgttaaagcttatctttcccaagagaaggtatctgtcctgtccactgctgccccctctcctgaaactctagaacagacagcaagagctcaataaaaacttcaagaatcaataagcaaactccttcccggcctaaaaagcacagaacttaaggttcaaagggacaagggccaaagccctgaaggcaggcctgtacactccaagcagtggcatggacgccggtggcgtggacagcaggttcagaacatcccccattgtcttggggactgcaggctgtgagggttcttggtaccttaaactcatctgagatctctgacatgaaggaagaaatctgcttcataaggcggtcaatgctgctctcactccctgtcttgaggagggtggtgatggccaatgtggcgatgctacggttcgagtctgtgaccaggttttccagatccagattgcaggcagtcaccgcggacgggtgcttcatggccacctgcagagggaggatagagacaccgggcaatagtacccaattctgtcatttcacctacagggtaggcctggccagaggtcctttgggcaccatgtctactcttctcccagcccattcagagggtagagacctactatcagccaggccagccccacccactcttctccacccaactcttaccttattgagggttcggacagcagcatagcgaagagcagccttgggtgagctacagaaaagctggagcactgcagggagacagacacacatgtcaggctgccctcgatgacagacagtggaatacttggggccccaggggaacagcatgggatcaaaggtgaacaagctctcaggcctgccgcacataagctcagcagaggccaacagaactgcattgtcctaaaccttgtcagtaagggccccataggtgtcaactattgatacatactaagtacctgccatgtgctaggcacttggtgagtgggtgacatgcctgtcatctcccaactcccagaaaacgcagcaaagcaactaaagtgacttttagttgcatccacctgagaggagcagggttaaagtcaagggctgtccacatctgcagcccaagcacttagccacatctctcctacgttcacagctaaagtctatgttcaagcattgccttggatgggactgtattctggaatatccaacttcctttcattattgcttagcttttattctcttgtcatttgtttggaactaacattttcttaaaataggataacatatctgttaaagcctatactttatgtctttcattattctggaaatatggggatatcataggagcacgttagtcggtaagtgaatgcacctattcttttgtttgtccacagggaagaagggagactgctccttccatacttgaaccccatctttccaccaggtttataccaccactgtagggagctctagaaaaagagcccaatcattccaaccctcctgtcacacgccttcacctctgggctggtcctggctaggtgctcatccctctctgattcttgggatccaatgtagaccctttttgaactctcaacacagacaatgttctgcaccagcccctcacctctttaagctctgggtgcacactcactactcccatcctaacaccagcatcgaacagctcgacaaggcattgacttgatgtttagagcagaaataacacaaagctgctgggttcttcttagtaacacccactgaatccatgctagtgtctcatactgggctggatggcttgtacagaccctgcctttactacctacagaaaagagagccattcatgtttcagaaggacagtgaagcccggaaaggaaggtcagaagacaggggcttgcccacctgctaagaacattgcctgtgagtccagctgtgagctccagtgctaccctatgaacacactaggctttacaggtcctgggccccaaccccagctcttcctctggagccagctagcctagcagtgctagtatggaccacacacttatctcttctgcactgagaaggaactgaaaacagcccacttcaaaagcaatgcctgtgatactcctagatcatggtctgtctgaagacaatctctggctcagagcctgtgcccagcagacaaactatgcagcagggaagggacttatggagacctgacacggcgggggccagctctttggcgctgcagcctggcaggttgacaatggctgaggcagcttcatacaccaccatctcatgcttgttacgcaggcagctctcgatgaagtcgaacagtgggctgtcacggctacaaaagaacatagcaatgagaagttggggacaatccagcaatgcaggaggcatcatctatctggaggagaccagtgttctcacctgccatcttcttcctccagttgcttgctagccactcggatcatcatgcagtaggcaaagggggacttcaggccatgacgggtgaacttactgatcatcttactcacggccagacggtcattcttccgtacatggtacagaagtcctagtgcgtggtactacaggacagaggcagcacaagaaacaagcacataaggccaggtctcctgctgggcagcactgtggccactgtatgtctctggctccacccttcttattttaagaaagtatcgcagtgacatccacataggggcaggagcagtttccccaagtgctctgcaaagcaactccggcataacgctcaacacaccacgtacgtgatgctcacattgcaccagaggtttggcaaggaccctgcaggcaccctgactatgtgggacaagatgccagaattgaatgagctgcccaagagctggggacaagacctgaacattgtcctgtgggacacaaaccattctaacacccagaggattggcctgagtgtccctgcttatctgacccattcatggccaagctgggtctgaagggctagaaacccagggatgctacttatagagatgtaaggtactaaggtcacttctgttcacttttagtcaaatgacatttgagggccaaagtatggcaggtgtatgtgcattccatgtgggtgtctctaacccttagagatgtgctgaagggtcaatggtgaccccaaaggcaagatctacacagagcggagggaatggcaatcactgaaggaaagggacagaccaacctttcccatccctcagtatgtgtgttttctcatttaagttttgcttttccaactttccaaagaaactaagactgggagaaaggcagaccaggttaggttattgaggaaagtttctcagatggaaacctcacatcactaacagagccagctcagcaaaagtttggactggatggccattggcctacctaggccaggcaggctttaacagcctgtactacaaaatattctcacctgcctttcaacacacttggctatttgagcagctccagcaagaatctctttcccaaatacccatgtgctgccctggccgcttctcccaagtccccatctccccacacccaatgacgaaaggatgacagcctgtcctggccagaggccaccagttcattgtgaacaatggaagtgtgtgatgcacctgcttgttttcagcatcattctcacctgtaccatgatgttatcactggacgccgcctcctgggcctcgttcacccatcgcttgaccacatcaaagctgcatttcagcagatgctgtgagcagtgggatttggtaaggagttaaaaggaagggtgcccttcttgtcatacccatgtcccctctcagatgcagtcagagcctcctcactgtcctgatcccaagaccataaacagacagctcagctgccaccctcattctccccacttggcagatttcccacctgatcccagtcccaccaatctgccatctaaggggggggggtgtgaagtcaaagtcactcaccccagctcttcccaatggaccctgagtttctggttctcttctaacaagactctcagacattttattctaccttcaacccacccctgcaggcccagtcacagctacataccagggaagatacgagggcagagctggagacactgggtaccttgtccacaatcgcttgtttcatgtagcgctcaacagcctgcagcatggtgctctgtggtgggagaaggcgagctaaggcgtggaaaccatggggtgtggagcaaagcaaacattttcagaagcttctatgagacactcccaccctgctcctccacctgattcagagtgttgcagacaaccaagagtatgcttgggacgaggcctcacttaggagagcctgagaagcaggcagagaggggaggaactcacatcagtgatctggcagagggctcgcacagcaggaccacggtaattatcttcttttccagtcatgtcttttgtcagactggtagggaaaggaggcactgttgacatgtagggtcccaagtcatccccctttctaatctacacccccccctgcctaaatttaccacaccagcctcctaagtattgttcccttctgttctcactcctccaagccaagctctaaccaaacaacagctccagggagatttacagaactcaaaacagagctgggcatggtggtacacacttgtaatcccagcactccgcagtaggatcaccatgtgctcgaggtttctgaaggcatcaaactgagcagcttctcagtgaactgtcctctcttctcaggcctttccacttgtggtttgttctgtctgggcctcacttcttcagaatctagaccattttggaggacttttctgggtacaaagccaagctggtgtcctcctgtactgctttcacagcccattatagttccataaacctgctatttgcatgtagatcctgaggctatggaggctatgtttgcataagtgtcctccaatattgaaacattccatccttcagagaagtttcttttttttttttaagattttacttatttattatgtatacaacattctgcttccatgtatatctgcacaccagcagagggcaccagatctcattacggatggttgtgagccatcatgtggttgctgggaattgaactcaggacccttggaagagcagtcggtgctcttaacctctgagccatctctccagccccagaaaagtttcttaagcaggaaggtaaacaattcaaaataccttcaggaaatccctgaatgggaccagattcactaggccccgccctgccacagtaaacaataaaagctgagcttccttctcagaccaagagctgagctgcgcagcagactctcagagcagaccagctgcctggaagaagcagacaccagtcaaactgcccggaatagttttagcccaattgaggcacctgcaaaagacactctccaacctgttgagctgcctacaggctgtgcctgtgtgctctaggttcccagctttgtgagctgtcacccatgctggggtaaggtaggctttggtgatgtagctgtccttgagtcatttctgctcctgagagtaaaccctcacccatattactgtaagcaaccccaataaaacacattggttcaccccaaactgactttgggctgctgtgggttctttatcttgagtgaggagacgtgtgttgtgtccccaggaaaagtaatgtcacaggataccatggctttcttgtttgctactataatcccagaaccatacatgggctgatacacattcagtatcatctttgtaaaaaagttttaagatttatttttattagttttagtaacgtgtaggtgtctgtgtctgcatgggattgtgtgtaaataagtgcaggtgccctccaccacatcagattcctctgaagctggagtttaagcctcctgatgtcggtgctaggaaccaactcagatcctctggaaaggcagcaagtgctcttaaccactgagccatctctcctgtcccagtaaataccgccataatgcacctgaatatggctgtatggacccctccttgcatagcagtgtcaagaaaaaaataagaagggagtggagatttggttcagtggttaagagcactgattgctcttccagaggtcctgggttcaatttccatcggagctcaagatggaatgtgagctataattctagttccacgctggctgtatgtctaaggaggagcagggggtcagacaagtgagaaggaaacagaacactctagaagctggcaggggggtggacttaggaggaaagggcattgaccatatgcccaaactccctttgctgtacatgttgcctctgtcaatgtatcccatcagaagagccatcccctgcccaagacttgcctgctggtcacaatgatgacatcctctgcgatggaagacatctccttgatggtcaagtagcacatgcggcgcagtgtgggctgaaagacagagagaaagccctatcaatcccgctccgtgagagaggcccagggcaaggagaggcctgccacctgtggaaggcagtccatgctgacaggtagtcctccaccataccgtcacaggcctcacatctccagaaaagcaggggttgaagtacttacatcattggactgaaagagtttggtcatggcaaagaaagcctcggttgcttctgtggtccctaggtgctccccctgtggtaatcataaaaaaatgtctcagtttgggacaggagatcagccagggtagaccttcagagcctgcagggactccaggccataagtgagagctggaaactcagaggacccacgactggcctgttagttccaaccacagagttgtgaaaagtttaagggtgcatcccttaacttttacaaacacatgcacacaagcacacacacacacccagtattccctgccaccttcatcttgttacctgatttatgagataaaggatcttggtgaggatgtgggcacatttccgagggttgatgggagtttcgttaaagacccgagcctgtgaagaagtaaccgttacttctagcctagtacacttccatagccaaccctcagttcatgaaggacctgaggaaccacagggtgtatactaataactcattagtccagataaatgtgttccaaaatggtaagagtttacttttcttcctttctattttcttttatgtacactggtgttttgcttgtatatattctctgtgagggtgtcagaagctctggaaccagttacagacaggtgtgagctgccatgtgggtgctgggaattgaacccaggtcctctggaagaggagccagtgctcttaaccactgagccatctctccagccctgagtttgtcttaatccatctactaaccatacctgcaatctttgcttgtgctgccctactgactacggatacttagcaaataaaatgaacaagcagcactttacatatgttactattctgacagcatggcacgtactcctgaccagatgggacaggtgtgacagaacttgcctcttggagtacagcgctcttctccagatgctgaagggggttggagcctccacctacagtgaacagagaagactgattacaggttgtgatcctgaattactttctttccttctttttcttttttgagacagagtctcatgctggacttgaactcggaacgtaggagaggaaaatcttgagcttctgatcttcctgcctccacctcctggtttatgtggtgctgtggaccaaacacagggcttcacccatgctaggcaagcactctaccaactgtgttccatccccaaaccctgaccctaaatttcaagactctaccaaacacagggaagggggaaaagtctgtatcatctaccagtggtagccaaggctctactatctgtctataaatcttgttaagggaactcccctcttccccagaccatttgctcacacggtgccacattttgcattcattcatacaaccagaacttgagtgaatctatgcactagtgaaaacaaacactaactaacctgtgacttgagtgtccccgatagcagatgttacacttctaattaattatgtgtgtgactatctggttgctgtctggtccctccactacgtgaccattctaatattcctactacaggtattgagtgtcccactggttttagctttggcagtatcaggatccgtgaggtgcctgatgttcagtatatatggtttattgaatgaatgaaacagtcaggattcttagctgcagaactggttacgccaagactggctggtacccacgcagctctctggtaagtaccaagaggtgggatgtgaatacagaggagcatccagcttgcgcccctcctctaataagatggggaaactgaggcccagaaaagagcgtgacatgcacaaggtcatgcagcaatcctgtccagagctggagagcgagaacagcttgtcccctccgaggacagctatggacctgcgcacaagcccttgccccttttgggcctcggctctggttctgacagaggcccggaagagcacccaggaagaccccaggaatctgtgcgaagatctggcctccccaggctttcaagggtccctcacccgactcctcgtccttcttgtcgaatttcttcaacatggtgccaggggaaagtccacgcagcagggagatgctcagagcagcggtaagagcagcttctcccagcggcttccgtactcccgcccgccacgtcgccctgagcactgcgctgtgaactgcgcctgcgcactctgtgctttgcgcctgcgcacaaccgcgcccagacacagggacaaccgagacctagctgagtggaggagggcggaaggggagggctgagaacgctaataaaatgggcgtggtttggcaccgggggcggggccaggacctgaagttgaagatgctccacctctgcgcccccgtgcgttcctgatgtttgcagttgccctggctgaatttaaagagtgttctgacctgagagttgtcagaatacagcggagcatccagcaagtctgccccatgaatgttccctgttattgtttattgtcttttttccggaagcttcaccaactgctcatctttgtcagtctctctcgcctgtttttccttcctttcggaaacaatgtccaacatcttgtatttttaatttcttgctttattgattttcatgcactcccatggataattttgggctagtagttgcttactaagttcttgttgaacgaattaatgcgtggaattgctctcaaattcgcgtctgcctctgtcccatgcagattttgctgcacttggctagctatgggaagatcgacatcacacctcactgctgcttttggtcgttgtgtgctcagagaaactcgagtgaaacgaaggtccgccgcgatggtagcacaggtcacaggcggggttggggtggctcatctggtacctaggtgaaatcatccaacatcaacaggccagaaactatctttaatccacacctcgctccttatctggagaaaagccctggaaaaaatgaatcaaaattgttccctgctgtggtttgataaaggaaattatggcacatctacatcctttagaaggagtcgtttttttacctgggcttggtgactggttaaagccagggctacacagagaaaacctgtcaggaggtaggtagggaaggaggaatgaaggaaggaaggaattaaggaaggaaggaaggaaggaaggaaggaaggaaggaaggaaggaaggaaggagggaaggaaggaaggaaggcagcccattggcagtggtggttcttgcctttgatcccagcactgaagagatagaggcaagtggaactctgtaaatttgaggccagcctgatctacagagtgagctccaggacaaccaatgttacacagagaagccctatctcaaaaaaaaaaaaaaaaaaaaacaatatttttttcataataaaaatttaagagtttctctctgtagttctggctgtccttgaactcactatgtagtccaggctggctttgaattcgtagagatcgtcctgcctctgcccccagagtgctgagattaaagggagtgatcggcatgcatgagtactagcatggggatctacagatgtctttgtattacttaatattgtagaactgtacggatgaaactataaagttacctgcgtattccattgttgtatggtaactatccttacgtaacaaaagcttaagttagctggccctggtggtggagatgagggagagctgaccaactcagtggccacccaggcccagaaccagtgctttgagttggcccaccccaataattacctcatccatgaactgcaggagtatgtgaaggggccagccctgcagaaccaaagctgcaggacctccatgactcagggcaacagaggactctctgtgaggtttccgtatcaatggtgtggcagaagacagaggcctggaatcattgcaatgaacgtttacaagtaaagctggttagacaaaagggcagagtagtgacacaccataacaccctgcagcctccacggtgagacttctttctattttcttttgggggaggttacaaagttggagggtagatatggaaggactgggaaatgagtgggattggggtgcatgatgtggcattcccaaagaataaaaaatgggggaaaataaaacttcaattagcagactaaacattttataaattgaggaatcttggaccaattgatgatagttctgattttattaacattttattgctataaaatactaagtgaatctctagatcctctagagtgtgacattctatagtctgtcttagacatgctggttggtttttcttttcaatgtttttcttctgctttaagatttagtattttaaatatatttttgccctgaagaatgtgctaatttagccaggtgatggtggcgcacacctttaatcccagcactcggaaggcagaggcagccagatctctgtgagtttgagagaccagcctggtctacaagagcttactccaggacagtctggaaaagctacacagggaaaccctatctcgaaaaacaaaacaaaacaaaacaagggaatgtgttaatttaatagaaactctgcttgtaaaaaccatcacttgctaggcttggtggcgcatgcctttaatcccagcactcgggaggcagaggcaggcagatctctgtgagttcgagaccagcctggtctacaagagctagttccaggactgcctccaaagccatagagacaccctgtctcaaaaaactaagaaaaaaaaattaaaaagaaaaaaacttgtgaattatctgtctttcttttatgtatatctgcacaccagaagagggtatcggatctcacaggactagagttacaggcagctgtgaactgccatgtgggtactgggacttgaaccctggacctctggaagagcagccagtgttttgttttggtttttttgtttgtttgtttgtttccaaacagggtttctctgtgtagctttggagcctatcctggcactcgctctggagaccaggctggcctcgaactcacagagatccgcctgcctctgcctcccgagtgctcagccagtgttcttaactgctgagccatctctccagcccatctgtcttctttcattgaagagcttttgttgtcatatccaagaatcattgcttaaacaagataaatttcatctgtcttttttttaaagtatattacagttttgcctattgcatttaattctttgacccatttttattagttttgatgtgtgatctgaggtaaggggaagtatttgagagaccagggagaagtgggaggagggtatttaggttggatatgatcaaaatacgttgcatacatgtgtaaaattgtcaaaggggctatagagcacctactgcttgtccagaggaccaagaggtcaatcaattcccagtaccaataccataagctcacaactgactgtaatgccaacttaaggagatgtaatgcccttttctcggctccacgacacccacacacatttgtgcacacacacacacacacacacacaaataaaaaataaaatgaattcagagaaaagtaatggttattgttataatattttataatatcactacagtccccaacttaaaaagaaaatccaaaatgtattgaacaaatttaggtcttcctctgacctcaccaacttcctgtcttgttttgcagaagccaaaatgtgaggtaggaagccaggtccttctagctcaccaaagtgacccagagagagcctgaatgtcctcattgtaatgagaagactcagggccacccttgcttcaggagtaggctccagtctcataaagggaatgctagcatgcatgaaatcctgggtttgacccccattatcacataagctgtgcctgacacacactggtaaccccagtactcagaagacaaaggcaggactggaagttcaaggttatcattggctatgtagtgagtttgaggccagcctgggatacatgaaactttctaaaacataaaacaaaataacacacacacacacacagagagagagagagagagagagagagagagagagagagactgtgttgggtgcagtggacatacctatagtaccagaaatttggaaggttgaagcagggagattgccatgagttcaaggccagcctggctgctatagtaaattccatgctagccaggactacataacaggactttaaaattaaacaaaaacaagcaaatgaaaaagtacaattgacagcacacaattggtcatctgtttccttcttgctgggaattcactttgtttccagcttaaaaaaaaaaaaaagctgatatgagagcctgtcttctgatgcatacacccggggttgcctcttgaatatttatgccaaggatgggttgctgggggtacacaacacttcctgatatcactgacagtttcccttagtatttcttgaaatttatataccaccaagggtctatatgttcttatccagcaaggtgtgtgtgtgtgtgtgtgtgtgtgtgtgtgtgtgtgtgtgtgtgtgtgtgtgtttctttttcaggatatctataactatatctatctctcgatgatgatagatagatagtatctcagtggaatctgatttgtttctccaaagtggaaaatcatttatctgtttgttggacaaccatgatacttcactgagcagaggggatgaagccaacttacaatggggaagcccaacccatttccccagtagcctgagttaatagtaacctcatcctgaaacactgtcataggaacacccagaatcatgtttgtccagagatctggcacctgaggctcagttaagctgacatctgaaataagtgatcataaacatctctccacctttgcagtatttgctgtatctggtgcctggcacaaagtaggtgttctgaaaacagcagttaaatggcaggacccacattacagcactactagtccaaacagctccaggtttatttatccatttatttttggaataagaaattctttcagtcaagtggtggtggcgcatgccttcaatcccaacacttgggaggcagaggcaggtggatctctgtgagttccagaccagctgggtctacaaagagagttccaggacagccagggctgttacacagagaaaccctgtctgggggtggcatctttcagatggctgagaggttaagagcattggcttttaatacaaaagacccaggttcggttcccagcacccaggagttgggtggttcaaaggcatgcataactgcagatccaatggatctcatgcccttctctgatttccaagggcatcaggcatacacacacacacaggaaaaacacatgtaatgaataaataaaatgaataaaactatttttttctttacaaaaaaattccttcaggtaccaagggatactccttggtaacagagtgcttacctggcatgtgcagggtcctgggtttgaaccctaacactgcaagaagcaaatggggctcaggaagaaaggaaggggaaaaagagagggagggagggagggagggagggagggagggagggaggggaacagaaaattctctcatgttggccacttaaagtttcatggaggagaaaaagcatggaagccaaattaatgtctctgaaaataatgactttcctttcatatgataaagctgaaagaggcctgaactgggtgttttgtgggctctcagatcttagcagtgaagttcacacacacccccacccccccatccctgtcatcctcttctatccactggttagctgagcaggctacttggagctgctctcctgttactatggcacccaccagaggaaaagcagcctgtgcaagatcctctgccctgcaggaggggtgatgtaggaagggctgccagtgactcacaaggagctgatgacagtcaggtagaaagagcttggaacatctccacccacagcacactgaagaattaggacatcaaataaaactaaagggagtatctgtgactagtctcccaggatcctccccaccaaggtcaccatgcatgaggactgtcaacactggcctgtcctgagtccatgggttttatagttaaaagacctcccaggaataagtctgcctttcccgtggtagtcccccccccttagaaaaatatgtgatactgtgggatgtacacagacatatgtgagcaaagcaggtgcacatttcatcttcaaagactcagtccaaccgcttcctgggaggcactgatgtttgtgcagggctttggtcactccctgaagggacttcattttcttcctcaaaaaatagcaggggtgctggctgctaaaacttagcagttaagagcacttactgctcttccaaaggacctgggttgtttcccagcacccatgtggcaggtcgctcacagctgtcagtaatgctggcttcaggtgatctgacatcctctctgacttccaagggcaccgggcacacaaacatgcatgcaggcaaaacacattaaaacacacacaccaccaccaccatcatcagagtgctgggatcaaaggtataaggactttcataggtaagccctgatcggctacctgcatgtaaagatgtaaagaataaggaccaatccgtgaggttgcccaaagtagtaaggtattgggagagttcaccatgtatgaatgagcatagactcatgggaaaggcaaggctttcccctggtccacgtatggatgttgatgaatggttgacctttagcttttttttttttttttccaagacagggtttctctgtgtagttttggagcctatcctggcactcactctggagaccaggctggcctcgaactcacagagatccgcctgcctctgcctcccgagtgctgggattaaaggcgtgcgccaccaacgcccggcaacctttagcttttaaaaccagtattgcagaaagtgccaaccacagcctgcacatccccatgtctacagcctgagactactcctctacggagatgaattaacccgcctcctcattcctatgtatgtaataaacttgctggttttctgagctgctgctggtggctcctaaccccagctttgctttacttgtgtctgtcatcaagtcccaaggccctgcaggtcctggcagggagggttctccttcagggctgccgttctgttctctcctcccctttgatgttagaaggaagtcaggaaaaagtcctgcagttgtccaccttcctttccactcagcctgcttgcatctgttccctgctgccactccacccacaaccgggacccctcccggaaaagcttcaggtaggaattgggtgggtaaaaagattccccataatatctaggatatatcataatatctatcccataatattcccatttcctaaacattcacctgaatctgcccttgccctccctcttctggacacacgaagtccgcatggccagctgtttttctggactttagcagcagcctctaccctactggctccggtccaggcctcttcagcttacagcagagtgaccttacccacataactccagtcacctctggcaagcaaagtctcatgtgtattcacaatagaaatgcgttttgagaaatccattgttaggcgatgccatcagtatgtgtgaccatcgtgaagagtgttcatgcagatctaagtgtaggtccttcccaattgacttggcctcgtcctctgttttgttttactttttgtagtactaagaatgcaattaagagatagaagaaacacaaaacatgttagggtactgtgtgtgtgatggggcacactattctgtaataaagtaatattgttaaaaacagggtatctctgtgtttgttgcccaagctggtctaaaactcctggtctcaagtgattctcctgctttagccttccaaagagctgagactacaggtgtgcagcactgtgactggcttgaagaaataccctaaaataggacaacatagaagttttgtgattgtaatatataaactacatcattacacatatcctaatttttttgagacagggtttctctgtgtagctttggctgtcctgaaacttgcttatagaccagactggcctcaaactcagagatctgcctgcttctgcccttctctcctctctctctctctctccctccctcctcttttccttcttttggatacattctatttttagagctttacgatggcctcttcatactggcaacaccacaaacacgtgcgtaacatatgcttaagagcactaacggtgcagcatccctaagcaacacaaatttttggttccattatttttggggccactgtaatgtacacagtctgtgtttgtgcagtatgtgattttgggcgcttaacctatgcattcaacaaatacttatgaggtgtaggtttgtaggatctgtggccagaaggtcccttcacgaacagtcatccattccagatcctctctaaaggtcttcttagatttactttagtttacatgtgtcttagctacatttgtattgctgtggagagacaccatgatcaaggcagcttacaaatgcttactggggttgacatctcagagagtccatggccatcacggtgaggagcatgccagaatgcagtggtagcactgcagcagtatttcaaagctaacatcttgaaacagtcatgaagcggtgtggggggggcactaacttggaatggcatgggcttttgaaacctcaaagtctagccccagtgacacatctccttctacaaggccacacctcctaatccttcccaaacagttccccctactgagaaccaagcattcaaacctatgagcccatggaggcttttctcattcaaacaaccacaacataaatgagtgtcttgcctacatgtatttatgtgtgccacatgcatgcctggtgtccatggaggtcagaacagtgcactgaatcccctggaactgaaggtacacatagttggaaggcactgtatgggagaggaacccaaacccccgtcttctgcaagaacaagtgctgcctacctctgagcgtctctccagcccctcaagggatcttcctgttctcatttctcaggttccccaaatctctcactttaaccaagacacatggaactgtgttaggacccaaggacctgcatttaattcaggtaagtttttaaatttggagactttagaagtttgtgtgggaaaacgtttttattgttttgggttctgttgttgtttgttttaggaagggttgtgtgcttcccaggctccccttgaacttgctatgtagctaaggatcttcctacctccacctcccaagagttgggattgcagcaaaagttttcttttttaaatgggttgtatttgggactgggaaatggtttggctcaatagttaaaggcactggctgctctttcagaggacccaggctgctcacaaccatctgtacctaagccttctctggctgcctcaggtactgcacatgtgtgatccataaataaacacccatacacttaacaatgaaaattttaaaaatcgggttttgtttgtttgtggttttttgttttgttttgttttttgtttttcgagatagggttttgtgtgtagctcttgctgtgctagaactcactctgtagaacaggctggctttgaagtcacggagatccatctaccagctaaatctcttcctcttttttttttttttaaatctttaaattggttgttttgaacgtgcctgggactatcttcaggtccaaaaatgtgccaaaattcagaagggatggatgtattatattcctggttcaaagttttttgtgtttgtttggtttttggtttgttttctgatttgttattgaattttgtcagattgactagatctggaatcaaaaggtaagccactgggcacacctgtgagggattttcctgaagtgggaaggcccatctgtggtatgggcggtgctgtccaggagcagtgctgttaaaagaatgtcaacgaaggaagcttcacatttgtcccctttccttcattctcactggaaagctcacttttgctgctgctatgcttcttgctgctgtgctccccactgctgtgctccctgctactgtgctccctgttgctaggctccctacgactgtgctcccatcagaacccaactactttaggcttccaatgtagactgaagaccagcagctgtcaggaaacctccaggtcttcagtgctagattggaaaatatatctgtagatacagacagacagacagatacctatatacgtgtaggtaatttttttcatgcaatcaattctgttcctctggagacacaaatagggctcactaagttgcacagactagcctcaagttcacactcctcctaccccagtctcctgagcatctgggattctgggtgtgagttatttccagatgctagtgttcaaggtttttactggggatcagcacattggcatggagcctcatagagaatggctgagcttagctgctgagtctccagccccagcccccaataggtcagatggaccagtgtcacccaaagctccaggcaaacagagacatttaccatacatgacactgttagcaaaaattacagcaaacacttcctcctgctgcttgctgctgctggagtctgaagactgcagtggctgtccagggccagggccactggtggtgaaacccatgagcaattagcctccaacctaagtgtgtgtagctgtgtctggtagctcttcctcctccaacccccttttttttttttttttttttttttttttttttgagacagggtttctctgtggctttggaggctgtcctggaactagctcttgtagaccaggctggtctcaaactcacagagatctgcctgcctctgccttccaagtgctgggattaaaggcgtgcaccaccgcccagcttccatcctctttttcattgagatatttatactgatccaggtgtgatagacagtgcatgcctgttacccagcattagggaagcagagacaagaggatccaggtttcacctgtaatccctggctacccagatagtttgaagccagcctgggctacatgacactctgtctcaaacagacaaagatactttattctattgctattaagtacaatgcttatcaaaattaacattgacaacatatacagaaaataattgttttcaagtatagaaagcagtaagataagcaaaatagtttatctggggaaagcagtctcaaatttaacaatacaaatttaacagctgcaacttcctccattgttggactaaaaaataaaattaaaaaaaaaaaaagcatggtggcgtaggcctgtaaccccagcacttgggatatggagagagaagatgaggagttcaaagttattctcagttacatagtgagtttgaggccagcatgagtcacatgagagcctgtcagaaaaaaagtgggggtgcctggaaagacagttcagcatttaagagcacttggtgcacttttgtttctttgaggatttatttatctatttaatgtgcactggtgttttacctgtatatattctaaatgagggtgttgggtcccctggaactggagttacagacagttgtgagttgccccgtgggtgctgggaattgagcccaagttgatcagggaagtcctgtgtatatgtttgtcttattggttgataaataaaacactgttggccaatagggaagcaagataggtgggtctaggtgttgaggaggattctgggaaatgtaggaaagggttagagtctccatgtgatcccaggaagagaggatgcatgccactttattaaatatatagattaatggttatggttggtaattaagactgagctggcaaataagaaaccctcgtcattggccagtagcattgtaactaatataagactctgtgtgttatttccgggccctaatgtggcggcagaactcaggcggcttgcggaaagagttatcgttacaccaggtcctctggacgagcagccagtgctcttaatttctgagccatctctctagccctttgctgttgcttttaaagaggacccaagttcaggctctagagcacccacaatggaagctcgtaaccgtcttaactccatatctaaagattctgacaccctcttctggcctctgcgggcatccacacacacacacacacacacacacacacacacagagagagagagagagagagagagagagagagagagagagagagagagagaggatgaaacaaatcttttaaaaagagagagacaaaaacatagatagctcttgagaggcagaggcatgaggatcagagttcaaggccatcctctgctatgccaggctgcaggccgtgtctgcatgtgtacagcacagtacagtgactcatccattgactcatatgtgaagacagcttgtagcactcaggactacagaagttacatgtttgccacataagagaagtgaggtgttttgggactggagagatggttcagcagttaagagcactggctgccctcccagaggaccagggtttaattcccagtacccatatggcagctcacaactgtctgtaactccagttcaccctcacatagacatgcaggcaggtaaaacaccattgcacataaaataaaaataaattatttaagagagagagaagtgaggtattcaagaggagtatggggactggctcacttctggttctagaactgattaactatcctgtctaaacctttacggaacctgtccctactgatggctgacctggatgtcacagcttctgtagcacagacagcgtggacccagattgtctgtgattccaaccatatttatgatgttgtttgctgatcatcacccaaaatgacagcaccttggaggtcatcctcagtctgcattttcaggagcctcccatggaccttggcatatgtcttctgtcattgccgtccactgtgacaaccaaacctcagttgttctggaagcagagtggcactgtgactggatctcaccctgacctgcacaaaagagatgatgtccttatgtgcaacactttctaccttgaaagccacggtagaaatggtcacaattttactcagctttagtttgtacagaatgtcatcttcgagaaggcgtccaaggatgcttataaagataggcacatctttttttgttgtttaaaaaaataaatctgctggagaggtttgcaaagatccttgtgtacaggtgcaagtgtcaccagccagagatttcagctacagctgctgacacagggtcttctggagcaacatgccgctggctcttggggtgtgagccatgagcctctggctccgctgctccaaacccaaggccttgggcactcaagggcctagtactgccagcactgccaagtgagtttttgtggcccctacccatgactgcagttgtagattggaagaactccagccaactcattggcagtagctgaacttctttacaaggtgattcaagactcctgcagactgtttcaaaagtctttctggggctagaggaatggctcagtggttaaaagcctttgctgctcttgcagaggccctgtgttcagttcccagcacccatattgcagctcacaactgttacttaagttccaggggacccagtgccctcttctggcctctgcatacaccaagcacacatatggcatacagatacacatacaggcaaacactcatgcacatcaaacaaaaaatgaacaaatctttaagaaaaacagttccttgagagaacatgtttcactggagaagtcccaagcaaccatctaccacacaaaaataaatgctgtaaatcactatagtcggaagtttctgtcctgccttgtcccgaagccattttgtcccaaataaacacactggggcttatattaatgaaaaactgtttggccaatggctcaggcttcttattgtccaactctctcttaattattaacccatttctattaatctgtgtatctctacgtgatcttggcttactggtgatggcccggcctcttacttcctcagcagctacatgacttctcctccctgactctgcctaccacctttctctagccatttggatttcctgcctggctaaatcctgcctatccattggccaaaattattcatcaaccaataacagaaacatattcacagcatacagaagggcatcccccatcaaatcaccaaagaggaagtgagcccccttgtgttgtaaagatgccataaagcagtgggtctcaaccttcctaatgccgtgagcctttaatacagttcctcatgttgtggtgaccccaaccataaaattatttcgttgctacttcagaactgtaattttgctactgttatgaattgtaatataaatatcttatatgcagcatatccaatatgtgaccctgagggggttgcaacccacaggttgagaacccctgatgtaaaacctttggttgcttgatcacctaatgagtttgtttttcaagggctcgtcatgagattcaggaactccagtgtactaggctagggctctgctgctgagccattccttcagctctggcacaagtattcatttaaaaaaacgctggtaattcagccaggacaagctcctgattctgtggtgtttcaaacaataaatacatggaacaaatggacaatgtctgatacaaatgagtgctctaaataaagagctcaagggctcgtgagattacccagaaggtaaaggtgcttgtttagtaatttcctgagttgataaggtccattttggagcgaagcttgcaaaaacttaggaagttctaatgggaagtaaacaacccagaaaactcaggaagcacatgaaactgtctttcataagctgcaaggatttcagagagatgctttcagacaagatgtgtgtctggcaagagacaaggacctgccaagtttcgggaaagaactgccagcaagttgagcagtgaactcccccgttccagctttggtcagctctcattcatgctgggatgggcttctggtaatgtagctgcctgagtcattcttgctcttgtaagtgacacctcacccaaactcctgtaagtaaccccattagttcatcagattggatattgttagtctctgcactctgacctgtcatcggttccctatttggggcaaaatatttgttcacctccccctggcctcggaaccatatcccacgaactgcagagtctgataatctgaggccacacccacatggtagaaggagataacgggcacctaacctctacacatgtgccttgtctcaagcacacatacatacaacataaatacataaatgtaaatagcttaataaaaaagtgttactttttaaaaagatttattcattatgtatacagtgttctgtctgcatgtttgcctgcacaccagaagagggtatcagatctcattatagatggttgtgtgctgggaattgaactcaggacatctggaagagcagtcagtgctcttaacctctgagccatttctcctgttgtgcccaaattctgaaccccaaaatcaccaagaggcccatttcgatgcaaaagcaatgagtcttttattgcagttgtttaacgagctaactccattagcttgggcctttcatccatccaccacagcggatggctggggaaagaccctgaaaacccatgggacagagatcttatagggcagcataaggggagtgtctagggtgtacgcacaggctcaggattggtgtgcctccaggcttggaggacttgccctgtgttgattagtcaactggttgctatggcccataggccctcccagggtggttgctatgctatgcatgtcattgctgtgcacttgtccacaaagcacatctggagccgtaaagcacagccccgctagctaacttctgattggttccttgccacgaggtgggcatctgaactcctagtgaccaaggcatggtcaggcaagcacgtgttaggctgttatggctgccaaaatggggagctggtcccttcactccaatcccaaaagtggttactttcgtaagaataggttgctacttcagcttgggtggtctgaagagcccctcctagtaaggtaaataagagggactcactttttcctgaggagatattaagtgctgataagaacattagttttatgttaagctttctttaaaaacttactgtaagtatccttatagttacaccactgttttggacaccttaggatcactgaacgtgtccaacgtggtctatctgttgagttctaagtcagcctgatctatatagtgagaccctgtttataaacaaacaagcagggagtaaacacttaaatatactatctcaaaaaaactagagtttaacagtagtcaatgcctgttcattgcaccatggatagatgggcgccctgatccatctcactgctagaggcaatttgcactggtcaaaatgaacctcctgaattttcaatgaccctgaagctatcctatctataatatggacctcctcagtaattcagcaaggagccagtgatagtgaaactggaagctgtgctgtgattggtgaaaaagttagacccccgaaaactcaagtatctggggtcccaggccacgttcgcgatcaccccaatcaccaggtggattcaagagcttgctgcaaactgcacgaggctttattgtaatttaacgggctaaccccatgttagccatggcggatggccagaaaagacagctcctaggggctcccaaaagatcttatagggcagcgtaaggggagtgtctagggttacgcacaggcttacgattggtgtgcctccagccttggagggcttgccctgtgttgactggtcaactggttgttatggcccataggccctcccaggatggttgctatgctctctacgtcattgctgtgcgcttgtccgtgaaacacacccagagccataaagcatagcgccaccagctaacttcagattggttccttgtcacgagacaggcatctgactttctagtgactaacttctgatgggttccttgtcacgaggtaggcatctgactttctagtttctaggacaaggtcatagaagcacatgttcgaccgttatggctgccgaaagggaagctggttccttcaaaaacacataccatgaccttgtattggctatataaccaggctggctgttcaactcatgtttgcctgcacctgtatgtgtcatatgtgtggctggtacctacagtgaccaagagagggcatcagatcccatgaactgggggtagatagttgtgagctgctatatgggtactgggaatcaaacccaggtcctctagaaaagtagccagtgctcttacccacttagtcctttgattttttattttctcctttatgtatgtgtgccttaagcttttttttttttaagttttatttatttactatgtatacagtcttctgcctgtatgccagcagagggcaccagatctcattcaaggtggttgtgaaccaccatgatgtggttgctgagaattgaactcaggacctctggaagaacagtcagtgctttttcttttcttttttttttttttttcggtttttgagacagggtttctctgtgtagctttggagcctatcctggcactcgctctggagagcaagctggcctcgaactcacagagatcctcctgcctctgcctcccgagtcctgggattaaaagcgtgtgccaccaacgcccggctcagtcagtgctcttaaccgctgagccatctctgcagcccaatctctgcagttggttcttatataatagtcaatatagtttagaggtgtcaggagccaggtcaggtcaaatataaaaagtccttctttacagaggcttggtgacttccaggctaaatggccaattagtcaagcaccccactccttagattagaatttgagataaccataggagggtccaggacacctgccctggcctgagagcagttaacattcattcctccccccacttcctctttctctgcttcctcctttctctttaaaagccccttgttataatcaataaacggagaccttgtcaagaacactgcttggtctcgcttcttctttctcgcccattattttcaggcttggtccacctcgagctccgctggctggggcatagaggtacatctttttgtttgtttgtttgtttgtttgttttggttttttcgagacagggtttctctgaggctttggaggctgtcctgggactagctcttgtacaccaggctggtctcgaactcaccgagatccgtttgcctctgcctcctgagcgctgggactaaaggcttgtgccttaagttttttattttgttgttattaatttgttaactcacttttggagtcagcctggggacaccttcccactgtgcctctctggtgttgtaacattgtgtcccaaaaaaggctattcttgaattactgaataatagttgtggtagtttgaatgtaattggtcaccataagctcatagggagaggcattactaggaggtgtggctttgtgggagtaagtatggccttgttggaggaagtattactgtgtgggtgggctttgaggtctcatatatgcccaagccacacccagtgcctcattttacttcctgttgcctgcacagcaaatgtagcatctacctccagtaccgtgtctgcctgcatgccaccatgttcctcaccatgataataatggactgaacctcagaaccgtaggcaacccccaaataaatattttcctttattatttctagcctgggagacagccttaccccaaactgaatcaattccctgtgtttattttctttgttgagtatcatttttagacactggagaagaaatcctgaaagggaagttggaaatgtattgagaagtatactaaaatataataaaaagtcttaccttaaaaaaaaatgttttccttttaagagttgccgtggtcatggtgtctcttcacagcaatagaaaccctaactaagacaatagttttcagaggttaaaagcacaaactgatgttccagagatcctgagttaggttcccagcaaccacatggtatcttataaccgtctgtaatgagatctggtgccctctttgggcctgcaggcagaatactgtatacataataaataaataaataaataaagtaaataaatccaaagatgtgcgccaccactttaaagaatggctactgctttaaagaatggctaaaagccaggtagtttggcacacattcaggaggcagaggcaggtggacctctgtgagttcgagaccaacctggtctacagagtgagttacaggacagccagaactgtttcacagagaaatcctgtctggaaaaacaaaaacaaaacaaaacaaaacaaaaaaaacaaacaaacaaactttaaaagctgcagggtcctatacctgagaggctagagttgtagctgtgcctggccccagccattgctgatggtggtgatttgcaactgagggttccacattctgcttcagcactgttgaagcattaagtaagtctctgggtctccatgcttggagctgtcctttgagctcctaagatttcagcactcaggggctcaccactatgctagaaaagttcttatctgactactcttgtacggttcccatttgagtaaagcaaaaggccggaagctcactggcacaggagtaaacaactttgcggagaccaaactgatgagacaagccagtcacacagaggaagagggtccaaaggcaaaagaggtaaaaggtcaccttgccaaagactcagcttggctcccaggaacagagggcaggtcataatgcctgcagtgtaagaagggaagaagggtgcaaagtctgagggagggaacagtggccggtttgaactttggatgcagccttgatgtgttgagtgtcaggacagaggtccttgtctccaagactggcctagcctgccctcctggcctattctgagaagctctctctgaggcttgcttagaggagaaagaggttaagaagaatcgcagattcagtgcctgtcaatcattgccaattacaaccagcatgtgttttcacagacatctccagtatcaccagaatccaatcagggagaaacagtacaaaaggcaaatgtttgagcaacacacatggtgcactccgtgctaaaggcttccccatgcattaacttggctaacctctacaaccctgtgaaggttttattactatttgcaccttgcctggaggatacagctcagagtccaaacaacacgtaaaactgcaatttccacccaaggcctttcgttatgagtcacagcctttgctggctccttgcagctccagattcccactgcagggcctgccatgggcaggtggccagactgtgtattctccaagatcatctccatacaagggtgttcatgagtcagagacacactcaaagaactgaaagaagatgcttctcatattaccttgaacttgtattcttctttttcaaaccaacacctggcttatactgcacatagcaaatatatagagttcataaagaactttgttctgtattattataatgttttaaactaccactcggtgctatcactttaaaaatctgatgtgctttaagtagaaaggtggctagcagttaaagataaaaatactagtgctgggagggcgggtgagtggtagagaatgtgcctgggatgctcttgttcaatactgagcaccccctcaaaagaatgtattgcttgaaactagaactaatgtactattaaaaaacaagcttgtcagatgtggttcatgcctataatcctaggtcttggtagggtgaggcagaggattgctgtaagtgcaatgccagcctgggccacaaggtgaaagtctctaaataaataaataaatgatctcagtttgtgtcccatcttaattatatattcaaaaagggtgtgtgtgtgtgtgtgtgtgtgtgtgtgtgtgtgtaaaattagctatctttagaagaacacttttaagactgggaagatggctcagtcagtaaggtgtttgccatgcaagcatgaagacctgagttctgatccccagtcccaggtattgaatagctacaatcccacgactggggagccagaggtgggcagatctctggagctctgtggccagataggcaatttgaatcagtaagctcgagggcaatggagactctatctcacctgtaatcccagcactggggaggcacaagcaggtggatttctgagttcgaggccagcgtggtccacagagttagttccaggacagccagggctgtacagagaaagcctgtctgaggggggtatagagggaggtggagagtgggctagagagatggtgcagcagttaaaagcactgcctgctcttgcacagaatctgggtttggttctcagcacccacgtggcagctcacaactgcctgtaactccagttctagggggttccaacaccctcttctgggcttctggagtactgcatgaaatgctatatgtacatacatgcaggcaaagcacagagacattaaaaatgaataaataaaatcctttttaaaaaaaggtggagtgactgaggcagacagccaatatcaacctctgacctcttacaatcacttgttcccacgcatacatacatacataagcacacacacacacacacacatgcatacacacagagagagttgtttttaagaacactgctataaatcaatggttgtgtgatacagtgctgattaaaacacttggccaggcttggcattgcatgtacatagcacatgtagccccagcactcagtagacagaggcaagagaactgttgcaagtttgaggtcagcctcatacatacatacatacatacatacatacatacatacatacatttccaggccagccagtgctacataaagggactatctaaaaaataaaataatatagtaaaatagtaaacataatacaccacaatttgaatttttatgttttgttgcttctggagattggagccaggtgatgtgaacccatttggcattggctttacttttatagccttgtggaacagtgatctgtttgaacggcatgtgcttgcctggcacaacctgtgaggaagttccatggctcccttcccaagccctagcttggtgcacatcctccctgtgcccagaacacagcagctgtcagcatgtcctaatgacccctgtggcccctgcactgagatgtaactgagcaaggggttgtgctctaaataactcccatggcagccaagcctggttacagccctttctcaatatagtctttgattcgctttccaaaggtcagcagcttgtctgtatgtgtttcagggatggactatcagcttgtgtttaaaaggaggagatcctgggtccatccctagcacagcagaaaggaaaggcagaacggaaaagagaatgtttgtaatttggaaagtacaattgagctagataatctcaggatctctatgtgtgtctcacctacagagactacacttgacaaaagtgtaaaatacaggtacaagctcgaggccacttaccgtagggttgtgaaaagattctcatcaccagtcctatccacatgcatattaactttactatttgtaattcaagcagaaatttctatgtagctttttcttgtgtatgtgggtaggtatgcatgttcgtgtgtgtgtgtgtgtgtgtgtgtgtgtgtgtgtgtgtgtgtgtgtgtgtgtatacacatgcatgtgtatgcggaagccagaagtcagcctggggtgttgttcctcagtaggctccaagaatctgtctctgcctcacaagagctctcactatgaaggtgtggcatcacacaaccttggcaatgtaatattttttgatcttactctgccattttaaattataaaaatatccctttatgctggacatggtggtgcatacctttggtcccaggacatggaagacagaggcaggcagagctctacgacttggagctagcctggtgtacatagtgagttccaggctacccggggttatatggtaacaccctagctcaaaaacaaacaaacaaacaaacagacaacaacagaaactctttactacgcaatggtggtggcacatgcctttaatcctatcactaaggaggcagaggctggtgatttctgtgagctcaaggccagtctggtctacagagtgagctccaggacaggctccaaagctacacagagaagccctgcctggaaaaaaagaaagaaagaaagaaagaaagaaagaaagaaagaaagaaagaggaagggatgaaggaaggaaggaagaaaggaaggaaggaaggaaggaaggaaggaaggaaggaaggaaggaaggaaggaaggaaagggcctcctaacccagcataagggagattgagacaggaggatcaggaactctaagtcatccttggccacatagttaggagccagactgggctgtatgagactcccttaaaataagacaaaaagtaaataaaaacaagcaggcctttagtaccagaactctgcagacagacaggtgggcctctgtcagttcaaggtctacatagtgagttccagaacacaaccggggctaactgagttcaagacaagccctggtctacagagcaagttctaggacagccaggactacatagagaaatcctatttctaaaaactaaaaggaaaagagaaagagcatctaggctacatattgagaccctatctcaaaagacaattacctcatagggagtagtaatttctaggtgggtatcaggtatcagggtgtttctacagcagtctcccagcagttggctcactgcagagtcagggaaagacccaaaacttttagtcagagactgtcaaccttcaaggattaggagagttgtaagggacagtgtgctcccattctgcagtaggcacaagcattctggagcagggagagctttctcagaccaattccgtctagggcacctacaatctagtaaccctgtggtgtttgttatagacatgatttgtgtactctgaccacactgggttaggaagatgttaagtgtgcagcctgtgtattataccgagaagacatgtttatcctcacagggcctagaggcagggcctgtgtgtttatgataaagacctatatccagaactgggggaaattatttttcccatttctccactatcaacaattcacatgcactgcccctcccccactgattttttttttttattttattttgaaactagatcttatgtagcctatgctggcctagagttcaaggccagcttaggcattttaatgaaacccaggcacaaaagtaaaatgaggtctagggataaagctcagtgacaaagcacttctagcaagcacaaagtcctgggttcactctaataccaccacagcaagagcaaaggaaagcagggcatggtgggtggtggtgcaagcctcctaacccagcatgtgggagatggagacagaaggatcaggaactctaagtcatccttggccacatacttaggagccagactgggctgcatgagactgccttaaaacaagacaaagagtaaataaaaaacaagcaagacttcattccctaaaacacaataagttctgtgtgatccaagcaaaaaaaaagaaaagaaaagaaagaaagaaagaaagaaagaaagaaagaaagagctggttttgtaaacagaagagcctggagacagcagagaaaaacaaaccaagaaatggattgatcatttcagctctgttccttgtaacgcacagagtgacagcaatagagaaataactgatgagtcaacaccaggctgtctcaggttactcctgaatgaggatgagggcagagggaacgtccttaccacactgattgaaactgtcagtctggaaatccagctgccatctctctaatactaatttcttggaaagtcagataaacatatgggttccacttagtgaccgtagtactttagtgtgggtggctccatttttttgtttacttgtttttgtttttgtttttgtttttttccaagacagggtttctctgtagctctggaggatgtcctggagctcgctcagtagaccagactggcctgcaactcacagagatccacctgtctctgcctcctgagtgctgggattaaaggcatatgccaccacctcccggctccattttgatttttagtctggcctattggggcccctttgtcctaaactgtgaagtcctggctggaatgtggctcagtagtagaacatgtgtttagcaatggagaagcccttggttcaaaccctaccaacccaaaacaacagaatcagtggcctgtaatttttatttaccatcccagaatggaaaacacccttgtggatctcagcatcggcacatatctcacagaagggtaagcatgtccaaagaagggcagcaagagtccctgctgtcagcagatggcagacccaggctagcccctggcagccttcccaatgagcacatgttttgaaggaggttcttgctttgctgtggtcctttctcttccttttggtccacatgattactgagaaaaaagtcctgggtgagcccagatgactcagagctaagggatgacagggcagggtagggttgtgtatggcagagagtgctaggctacccagagaagggaatgactcacttaggaaaccagagaggcttgtggaactgggccaggagcttgggctgaagcccagcccagcccagcccagcccagcccagcagctggacaggaaggatctaaggagaaggctcctgagaggagtctagaggggtagagggagccagccatggggctggtcagtctcacagctgtgtattttagctctgtggagctgtaggactagagaagtgctggtctgttttctcttttgtgcagtggtaaaatattatgacacattgtatccatttcacctcctcttttgtatttcttaaaccatttttacgtgttcagttgaataacactaattactttaattgcaattcaatgatcactgtttccagtgttctaaaaggaaattagcttcccacttctccttcctctacctcctagtaaacctctaacgttctttgcttctgtgaatttgcctattttaagttttatttttaaatttatttttatagtgtcttgctacataaccccaggctgacccaagactcacacttagctcaaactgaccttgaactctgtttctacaatactgggattacaagtatttattcattaccttgccaagctcatctatgtgtatgtaagtaaattctttcagtttgatctggcacatttgcttaaactcaccatattgctaaagatgaccttgaatttctgattcccctccctctgtctcctgaagtttgggattaaaattataggcatatgataccatgcctgatttgtgtaaggctgaggactgagcccagggctcacgaatgctaagccatcaccttaacaactaaacttcattttcaggcactgttttcatttcattttattttaacttattgagacatggccttatgtagtccaggctggccacaaattcactctgtaggatggccttaaattctttttttttttttagagagagagagagggagagagagagggtttctctgtgtagctttggagcctatcctggcactagctctggagaccaggctgttctcgaactcacagagatctgcctgcctctgcctctcaagtgctgggattaaagatgtgcaccaccaacacctggctggccttaaattcttgattacaggcatgagtcaatatgtccattatttatatatttattgagacaaagttgctatctattgaggactagtcttagactcataatccttctgtttgtgttttcagagtgccaggctcattggaagttctgagaaaatcctcagacaactttaagtttatgtgactttttttttttttcgagacagggtttctctgtggctttggaggctgtcctggaactagcccttgtagaccaggctggtctccaactcacagagatctgcctgcctctgcctcccgagtgctgggattaaagttgtgcgccaccaatgcccggtgatttgctttattttttcaaatcacatatatgtgttatgtctctgtgtgggtttgtgcatgtgccctgggaagccagaagagggttttggagcccacaaagctagatttataggtagctatgatatgcccacttgaatgctggcatgtcagctcaggtcctccaaaagagtacacaatctttcctacagccctctctccaggccaaagcacataagtaacaacagtgtcctctaatttccacatccaaactgtggtactcattcagttcccacacaagataaatatcaatctttttaaaaaggttaaaacaatacaataaaattggtgatttatattgaattagtttctctagtttgcatagggactttgctgactcattcacatttatttctcagaagcaaagctctagaactcaggcttatggtctgagagccttgggatgaagtaaaacgtctaaaaggattcagtgtttacagttcttctgactcagcataattttttaaattcccctttggcaaagaaaactaaatgattctcagactccctacaacctcagccaattaagcaaccatctatccttgtaaaggaagcttgggggacagtggtcagagaccagggtgcacaggcagtgccaggtgctcctctggagctatccaaagccttcggttgatttggctgatccatctgggaatatgaagctgacttgtattgttttaattcaaagcaaaacaaaggcaggggaaataaaaatccagataaacactttaaaagggtcagatgcaatggcactcacctttaatcccagagatagatagatagatagatagatagatagatagatagataatatctctgtgagttcatatcaggtctagtctgtaaataggagttctaggccaaccagggctacattgggaaatcttgttgttttaaaaaagtcgttcaaaagtagggacttctgacacatgatacaaaatggatgaacagaggacattatgtcaaatgaaataaactagtcatagaaagacaagtactcagagtcccacttacatgaggtccctagtctcatccatagagagaagcatggtggatgccagaggctggggagggaggcagagtttcagtctgaaaagatgagaaagttctggagatagattctggctgcgtagcaaattttatatcatgtattctaccactgtacaatatttggataaaggacccaccccaagccaggcatggtggttcgcacctgtaattccagtacttgagagggtgaggcaggcagggtgctggattctaggcgtgtgctacatttcccaacttatgcaatgctggggactgaattcagagcttccaactgtactacatctccagccccaggtacctacatctgctgagttgtaagcccatcacatgacacaaatggaactggccaactggtcctctcccaccaaagtcttccaagtaatgaccacaggagcaatggatttgtattaaaatatttacatttatttattattaagagggacacttgtgccatggccatcaggcagtcaagaggacaacccatgagagctggttctctccttccaccacgtggtccctggggatgactggttaacagatttagcagcaagcaccttcacttactgagccatctaccagccagagatgggtgtttaaatcaaatggtcagccaaggtatagggagaaagcaagagtaagggccttagtgcaaagtaggcaataaagggaatagcttagtggtaggaaagacaaagaaaactgctttaaagaatggcacacacctttaatcccaacatttgggaggcagaggcaggtggatctctatgagttcgaggccagtctggtctataaaaaagtatgttccagcacagtcagggctatatagagaaatcctgtcttgaaaatttttttctaattttatgactttttgttataatttatatagtggtaatccatgtctattcaaaaaattgtgatgcctgtctattttaatttttccttgttgtttttggttttttgagacagggtttctctgtggctttggaggctgtcctggaactagctcttgtagaccaggctggtctcgaactcacagagatccagatccacctgcctctgcctccctagtaatgggactaaaggcatgtaccaccacctcccgacctgtctattttaattttatttagttgttttgttaagacagggactcatgaagcatatggctgctcttgaactctctttgtacctgaagctagctttgaactcttgatccttctgcttctagctcccaagcagggaccttagaggcatgagtcactatagctggctatgcatttattcttttaccccagtgctgaagatccaatccagacctttacacatggaaggcaaatgtacctctgagccattccttcaacccttcatgctcatgaccatgtctgctttaaggccccaccccgtgtaccccacccatgtgcatatggaacactgatatttattctgtaatcactaaatgctatcctagctacatgttttttagaatcttggctcacttcctttgacccttcaaagtcaagtgaagaccttggtgttgttgtttgttctttggttttgagggagaggactagccttaagctcaagacctggagtctccacctcagcaccttttgtagctgctacaaatagcactatgaattcctacttcttcaaacaaccacaacagcaaaaactctgagcctcacagaagcgaaagactccctaataaagtcctgttttagactatactgtttgcttccaaaatctgtcctttctgtacctttaaatcattcagttgtgtacttgcaccataagcaacaagattactggacatggcaggcctggtggcacaggcatttcgtgccagctcctttggaaccaggatcatccagccccacctgggctgcagagttccagataaatctgggcaacttagaagaccctgttacagaataaaaagtaagaagagaatgaggggtgtggttcactgatagagtgcttaccagccttgggttcaacccccagctaggcaaaagagaaaggaaagaaaagttgagcatgctgccttaattccagcactgaagtcatagaggcaggcagatctctgtgggtttgaagccagcctggtctatgtagggagttctagatcagctagggctacataatagccctgactcaaaacaaacaaaacaccaaagaaaattaactgtgtatttaaagtaaaggaacttaatagaaggctcatgtgtgaccccagacctcatgaaaagaatgaggagctagtctggcttaggaagcccaggagggcagaagggtccccagcctcaatcttcaggtcaaccctcacctgcttgtggttcctgtccttcaaagtcagttcaaacagtacctgtctgtaatggtttttgttttttggttttgattttggttttggtttttggagacaggtttctctgtagcattggagcctgcgctgctacgtttgaggacttgagtttgatccttgggatctgcacagtagcaagtttttccatttctgccccctatcccatcaatcaatcaatcaatcagtcagttaatcaatattttctttaccaagatctttcctctgatttgggattatattgaaggctattgcatgttagtaaaacagctcttcggaggggaagaaaaaagctgcaatgcatttactaatttctgttgtataaatattactaggaagaccactgtcaagccctggagtcagctctggtgtatcactagatgtgggacctattaaaagggccacatcactagggagcctatctcaagtacttcaagaggacgtaacatggaatggtgtgtctttcctttgaatcatctgaactaggtctttcttaagagccagtggatccaaacaggagacaaacacatcaaaaggaatccagcagaaccagatgtggtggcacacacctttaatcccagcacttgggaagcagaggcaggcagatctctgtgagttcaaggccagtctggtctagagtgagttccagaatagccaaggccacacagggagattttgtcttaaaaaacaaaaatgaaaaaccacctcccccaaaaagaagagaattcttgttattatgttgttgttttgagacagggttcatatagcccagcctggcctcaaactcactgtgtagacgaggatgatcctgaacttctgacttctgatcctctcacttccatttccagagagagagagagagagagagagagagagagagagacagaagagacacacatcttgagtcttccagaaaggcaaagtttaaaaaaaaaaaaaaaaaaaaggaggaagccacgtggcttggtcccaggcgatcaccatgcctagagtgttgctgctattaccattgctatgtttttatttaaaaggaggaaaagagaaagatgcaagatgagacatgttaactagtttattatatggcccggcagagtagggagactaagagagaagaggaacaggggtaatggctgaccgcatggccggtcgccatagagagacagcacgtaggtgggagaagagaagagcagagagagagtaaagaagcatcgtgaagagaggaagcaggaaagttgggacttttaaagggaagactgcgcatggcactgaggttccacgcatgcccagagtcctcatgcgtggcgggtgtcctggtgatgatgtagcatgttttcttgtgcgtgccccaactgttgtcagggggcaaggtctgtctcttaaagaggtagagccgatcagcatcaaagcctgaacctttcaaccatgtctgctctctaccagtggctaggtagaggttcaggagcagggtcatcttgggcatgctgcaaatccagcatttgctggtgttgacaccctcctggggctgtggcggcaggctgctgtgtcaggagcccaattcctgggaacagcagggtgatccaggacctctagtcagcctacacacctcagtggggtaccttgccccttttctccagtgcagttcagcatcaaggttgtctatttccaggaggcaataaaacctgagctgttttcctcagtggttccatctccaccccccaatttatgggagtagtgggagggaataggaaggatcactgagggggaaggggaagtccctggggatctatgacctgggcctcttgcaggttcttcaccagttgtgcaagccagtgttttgtggtagtgtcatcttttagcacctggacaaaggttgtgtccttcagctggtcagggaggcactgtctgagtgcttcatgtttcctgggattatctgaggtaacatcttactacatgcttcaatagactggcagacgattctttggatagcttcaggaccattttacccaagatcatggcaacatgggaaaaacgctcatactcctgacatatataacctaaaccagtgtcatctaagaggatcttctgtaggatgaatgtggcaaccattttagaaagttcacttccagattccctaatgcgcaaacacaaagggattatttctgttgtcaataaaaagctgattacttcttgttagtctgttttaaccaaggccccaataaccaaggctggtgagccgaagatactcaaagggacgatgagtttcgctgactgtgtgcacaaaggggtacaaaaaagtgggatgtgttcttcaataaaagtcgacctggtctcctggtgtgaggcccacacatgctgcaatgctaaagcattgcaaactctgttggactagtgtgctgtcaaagtttgagggttgatagatagataaatatttacaatttcctgtaaaagtgctgcaatagccaggcgttggtggtgcacgcctttaatcccagcactcaggaagcataggcaggcggatctctgtgagttcgaggccagcctggtctccagagcgagtgccaggataggctccaaagctacacagagaaaccctgtcctcaaaaaaccaaaaaagaaaaaagtgctgcaatagtaccaaatgaatgccatagcaggggttcaaggtcagggacagattctcacttcttgcttagctaagcattttccctggtctcaggactggacagttcattgatccactgacagatcttctctctgtccacttgggacagtgcagtaggcataggtgctgcagttgcccagctttgcatgttgggagtggccgcctctccttccaccagatggaccggatggaccccacgtcccagttttagcagttgtgaagccggagatgaagaggaactagctcttgtagaccaggctggcctggaactcacagagatccacctgcctctgcctcctgagtgctgggcttaagggcgtgcaccaccaccacccagctgattgaacatattcttaccatcagaactaacaagtgtttcttgataatttatccaacttgtgcccatacaacaattagtacccatatctttacagtagctttatccttgattgtcaaaacatggacaccagctagataatcacagtggcctctagctcattacatagcccaggctaatcttccaagtgctgggattcttgttgcaagcactacaccttaagacccacaccgctgtacagtgcatggcagttcccattaaaagcgtctgtgctaacatcttttctgcaggttccagattctgcttactgtgtcatggcaaaggcctgcagaaggcacacgtcaacagctgctactagcaaatcaaggtgggaaggcaatttaggaaacaggaaaaaccggaggaaaatgctttgtcttaccaactctcttaaatgctggctcttaggatcagcaataaacaagttgtacaacttggggttaaagttgagagggaaaacaaagcattccctcgagaattagtcatagaatattttaaagataaaaaagattaattcatggaaggcctgtgttccagttactgtaacagggactaggatagtaaaaattagtaagacctatctttcactcatgtaacttgtaatacagtatcatctaacgtttgctgatggtgattttgagactgggtctcaccctctagcccatgctggccttgaatgtcagccctagccttctgcatgctaagattataggtgagtgctcccagacctgtgcactgctgtggattcttataatttcatccttgagttccttctaatatatatatatatatattatacatatatgtatattatatatatacatatatatatgattatatatatattatacatccctgttatgtgtaatatatatgtattagaagggatgtataatacatactgggatttataaaagcaggtcgtgggctgggatgcacctacatgataaaggacttgcctagtgcacacaagtgtgcaagcacatataaacacacacacacacacacacagaaggaaaaatcaactaaagccctgtatatatgatgtaaacaaacttgagacagcacttcctaagcacctatgtaaaacctactgcagggatttagtgggctaacagaggcctaagggcaaaacatggataacaaagaacttttgtaagggaagtcagtgattgcctcctttagacttggatcctaagaatgctggaaagatcacagggcagagggaagacatactttaccagtgggtcctacatccctatgctttctctctaaaaggatatttattttaagattctgtttgtttgtttgttttggggaaagggtctctttctgcagccctggctgtcctagagtttaataagtagaccagactggccttgaactcacagagagccacctgtctctgcctgcccagtgctgggatgaaaggcactgatcattgtgactggccttatttttaattgtatgtatacgtatcagttgtgtgggattatgtgtgcttgagtgcagttgccctaggaggccagaagacggtttcagatctcctacagctgttgttacaggaggttgggagctgtgcaatatagatatctggaactgagctcaggtcttctgttagagcagaaagagctcttaacctctgaattatctttccagccccttatctcttatttatttatttatttacttgtgtgtgtgtgtgtgtgtgtgtgtgtgtgtgtgtgtgtgtgtgttctgtgtttgtaacatgggacacaaaacaaaacaaaatagaaatcaagctaatgaaatcgatcattcactagaaatgtttccacgagagctgagtggaggcagaggcaggaaaatcagggttctaggtcattctctgctatctaatggctcagagatcagcctggtctccatgagctgtgtctcaaaatcccaacagaaaaaaacacaatcctcacaaatgactgtgggatatccaccagagaagactgcttgggcgtgggtttaagccaataggaagtcattattagttgcccaatgactacactgggtgtttgggatcctagtgtagcccccgaacctttctcagagtgagcttttaagcacaaaaaccatatcctgggttgacatactttagttagcaagaacagttagccagaagtggaactacagtggccaaaaagcaaggttagtgcatttagagactaccagaactatgaactttgacagagtaggcctttgttttaattttggtaggtggcactgtctacatgctgagatttatggcctgaatggtacttccatcatggagtaagtaggtctgggggcctattacaaaacaaactttcctatgaaataaagacttacaggaaagaaattgtggccaggcctggagggtataggcctgtaatcttaggcactaggtgacagggaaattccaagttcaagggtagtcccagctacagagtgaaatcaaggtcagccttgtagctttagttatagaatgtttgccgacagagcctggggtcctagattttatcttcagtactaaaagcaggaaagaagaaaggaagaatattactcaagagacctacagagattcactttaatttgttttcatatagtgacacttacttaactcagacctttggtaatacacaaaaccttttccttgacattatttgtatagcacacgcataaattctcatactccttgacatcccagcccaatccctgtctttgtctttagcttaagcagaaattatgagcctgtctgtctgtctctgtctctgtctctgtctctctctctctctcacacacacaattcctacaagaatttttgtacatcagattctctgttcattatgtagggaattaactaatgaaattctactaaatgaaatgaaccctgggtgggggagacaaatatgtgttctcatccattctcatctatggaagctttaggagttgacctgtagctggggggcagggggggcatgcctttgatcccaatactcaggaggcacaggcaggtggatctgtgagtttgaggccagcctggtttacagagcgagtgccaggacagccaggctgcacagtgaaacctgtctcaaaaaaataaaaataaaaatattgactgccaatgatgagtaaaaatgtgaatagtagaggcctggaatggccgggaagcaaagacagaaaggagttggaaagaggtaaagttaggaggggagaatcatgtctagtgttttcagcatggttgagtgactgcaatttaaactacctgtgaaaaactggaaaaggtgagcatgatgcctccaaacagaaggaatgataaggaaatggaaatattaactacaatgatttttattttacatgtcatgtttatgcatgtgaaatagccgagtaaattatacaattagtgtatataataaagaacagaaaggttgatgaaatgactcatatccacatggtagaaagattgaactgagttctgcaagttgttctttgacctccgaacctgtgctttggtgccccctccaccagaaacaaataagtaaataaaataataagtttttttttttttttggtttttcgagacatggtttctctgtgtagctttggagcctatcctggcactcgctctggagaccaggctggccttgaacacacagagatccgctgcctccgagtgctgggattaaaggcgtgtgccaccaatgcccggctaaataataaaatttttaaaatgagctgggcattggtggtgcatgcctttaatccagcactcaggagcctgaggcaggtgaatctatgagttcaaggccagcctggttttacagagtgggttccagaacaggctccaaagccacagagaaaccctgtctcgaaaaaccaaaaccaaaggaaacaaaaatccttgaaataagatttcatgtagcctaaactaacctggaacttgtaatcctaggacctcagcctcctgagtgctaaaaccacaggagtacactgcatcttcagctgcaggtcagagatctctggctgaagtgtaaactgctgggctatgcagatgccatagccaggtggctccatcagtgcagatcaaggaggttgctgccctgttatggcattcaggacgacagaattggttgtgtgggttgggatagcccacagatttatggccaggtctgcaaaaatcatggctcctgtttctgccaaggaggaagtggcagccactgagcagaggactgaaaagaggctacctgctacctaaaggcatactggctttggctcctctgaagctttctctttttcaaagtcactttgtgagcactgactgtactggaataatcagcgttctctgtggctggctgaaggatgagtcaggattctaaattctggctgcagagctggggaaacgggaacgccagggaaggaagaccgtgatgtcagcagcttctcagggctgatcaaaatgctggagagcatgggctgggtttgcagtgaaataaacatatttaaatgcttgaaaatgtcaggggaaagatttactaaagcaaatctatgggcttttgacatctgccctcaagcaggtaaatgctttgatatcaccaattaagatacactgcagtgagatgggaagccagaaagacctgccctactgaggaatgtgtggacctcttcagtcccttcctacccttaagcctctgaataaaatggcttgacccttctctgaccaaaataaaatatcctgcagcacaaagtgacgcagaataaatgatagctaccaagtatgtaggctacagtgatgtcaacaagctcaaagtgaatgaacaccttcacttactttatcagttgcacacactcacatcttagcaattctcatgcaactcctaaatgttctatctaacactttgggaaatagtattcattaagatggaaatgcatgcactctcatgaaactgtgatggctgatttttgttgcaacagaccaggaagatgcaggaggatctctgagttccaggccatcctggaactacatagctagttgcaggccaaccagggctacatagagagaccctgtctacaacaaaacaaacaaaagctaaaataacctcttgggctaggaatgtacctcagtcagaatactttgtagcacatttatttgaggtcctagtactacaaaaacaaacaaacaaacaaacaaacaaacaaaaaacatttagagatgattagaaagatggctcagtgggtaaagcacttactatgcagttcagatctccagaacccaggttagaaagcaaaacatagcagtaatggaagcatttggaattccagttatatccaaagatataagaggcaagttagcttggcctatgaagcagtgagcaacaagagaccctgtctggaaacacatggtggaaagtaaggactaacattcaagatatccaaggttggccaggtggtggtggcgcacgcctttaatcccaacactcaggaggcagaggcaggaggatctctgtgagttcaaggccagcctggtctacagatcaagttccaggacaggctccaaagctacagagaaaccctgtcttgaaaaatgaaagaaaggaagaaaggaaggaagaaaggaagaaagaaagaaacaagccaaataccaaataggttgttctggaaagaagaaactgaaactgaagactaccatttaagaacacatgtttagcttcactggctatctggaaaatgctaatgagaaaatgagatgcaaaatgaaaatttatgttcatacaaaaatattgcataaatgtttgatttattttccttctttttgcaatcacacttactataatagctaaaaactgataagtccttcagtgagtggtagctaaaaagtccaactggggaatatcaccaataaaaagaatggattattgatctacaatgatttggattgatctatagagagttatgctgggtgaaaaaaaagctaattttgaattcgtccatgtataattccatttacataacatttttctcttttcttttttggtggaggaacaaggtctctctacattgccttggctgttttgtagtccaggttggcctttaactcacagagatcctcctgcctctgcctcctgagtgctaagattaccatcttgattgagtcatataagattttgaaagggcaaatttttagacatggagctgagttgatggcttagtggataaactgagctttataagcttttgggatgcatggaaacttgccccctctcattctgccttgggcagattatttaagaactctgaacattttccttctggggatagtgagaatttataaaagttttgtaaaaactcatgaaaaagttataaaaatgcctggcatagccgggcatggtggtgctcatctgtgaccccactagtcagggaggcagactggaggatcaggattgctagctcatcttggctctgtagcaagcttgagcccaccacgggctatagaaacattgtctcaaaaacaaaaggcatgaaaggcatggtggctcatgcctttaatcccagcacttggggggcagaggcaggcagatctttgtgagttcaaatccagcctggtctacagagagagtacgagggctacacagaaataccccgtctagaaaaaccaaaaactaagaaacaaacaaacaaaaaaataggctgagtgtgatggcacatgcctttaataccagcactaggaaggtggggtaggttctaaactagcctggtctacacttcaagttcctggctagctagagatacatagtgagatcctgaataaaaacaaaaaaaaaaaaaaaaaaaaaaaaaaaaaaaaaaaaaaaaccaacataaatcaaaaccaaaacagctggaaatggtggtacatgctggcaggttatcccaaagaaatggagatgggaggattatgagtccaaggcctgcctggactatacctctgccaggactgatggaggaagaggcagagctctgtgagttcaaggtcacactggtctacacagtgaattccaggctaggcaaacaaattaacaaacaaatgaaagcaatttagaatatgcactcaatagatagtaacagataacagtgatctgtttggtttgtgtcaggctttgctatgagagctttatattcatagtttcaattcttagccattcaacctattttttgtttttgtttttgtgtttgtgtttccagacagtttttctatgtagcttttggagactgtcttggaactcactctgtagacctctgcaacccaagtgctgggattaaaggcacatgtcaccacagcctgggatccctggttgctgaagttgttatctgggaactggacctgggtcctctgtaagagcagtacatactattaatcctaaagccatctctctagcccctgtggctttttttttttttttttgagacaggatctaacatcgtacacctacttggaactgactctgaaggtccagctggccctgaattccttgcaatcttctgtccttggcttcttgaatgctcagatggattgattacaggtgtgctctaccacacccattctgatttcttttccaggttttagttcagtccctgtgtttctgctttgcaggcatacatgagatggaaacatcaatttattctcctcatctttagccacatactttccaagtaaagtcacagcactttccctgctggcacagaaaacacaaaggagaaagaaagatctatgtatcatctccatttgacagcagaatctaaggcttgtgctatgcagctgggcattgagaaggaaatgaagagttggcaagtacagctgttcaactgtgacccattttaagaactgaatcatgctgagtcatagcattttagcttgacctctctcaaacattcaatgctttcttctggccctagttaacctgcaagttcttcaagagcaaggtctagatgataactaattacctttgtaaccccatgtaacactgggcacgatatctgactaatactgaacagggaagcaggaggtaatacatattcccaaggccagggactgtgacaggtgtccctttcttccagaactgacagcttaacatttttattacatttatgtatttttatatgtgtacttgtgcatgtttgggagtactctattacacatgtgtgggggtcagaggacacgctggggagtctattctttccttataccatgtgggctccagatatcaagctccggctgtcaagccaggcagcaaatattgttacttgttgaactgtcttggtgacccaaggcttagcttttggtaagcttatttttctcttccttatttcttaaaccttcctagtgaaacaggtggtctgattcaggaaatacaagttaacttccattacaaatctctttgccaactgtcataatgcctcattggccggtctggttttatgaatagtgataattacagaaagttggaggccaagtgaagagtcatcagctgccacatggccacacctagcttaaaacaattattaatataagaaacattctggggtctggagagatggctcatcggtcaagagcactgcctgctcttccaaaggtcctgagttcaattcccagcaaccacatggtggctcacaaccatctgtaacaagatttggtgctgaacactgtacacataataaataaataaatattttaaaaaaagaaacattccatccctggacctaaaaataagatcaggcattttatgtgtgattgtatttagaatggtaagttagaaacaagccataaaattattaatttagcctggtatggtgttacacacctttaatatccataggaagagacaaaggaaagcagatgtctgtcagtttcaggctagccaagactacatagtgagaccccatcccagaagcaaaaaaacaattatggttcctatatgctggtgcaggagatgcacccaatctggactgggggtatagcctcggcttatacatgttcattgcttgaacttaagaagatggtacttgtttgcaattgctttaactcaagacattgtcatggatggatgtagtggtgtgtgcctgtaaccccagcacttgttcaaaggaggtcggaggattgagaattcaaggtcatcctcagttacctagggagtttgaagccatcctgtgtttggtgaccctgtctccaaacaaacaaacaaacaaacaaacaaaaagacacaaagataggaaagaaaaagatactatactataaggatagatcagatcagggagaggaaatctatatatctataaagctgtgtaaacttcccattaagaaataattgagccgggcgttggtggtacacacctttaatcccaacactccagaggcagagggagggaggatctctgtgagttcaaggccagcctggtctacagagtgagttccagggccgtcccaaagctacagagaaaccctgtttcgaaaaacaaaaacaaacaaacaaacaaacaaacaaaattgaaataaaatctgccattttccattttactggtaagtctaatattatagcttagtcaattgctaaggatttatcgcacatgactggaaaatgccatctttttatgctgactatgaaaacatttttatgcttcattgtttttgtttgaaagtttaaaaacagcacaggttcttaagatcaggcattctcctgttgttaattgttgctttttttaattaacactgtattaaacacaaactgctaatgctttgcaatgatgagtaatgttgatttgaacctaggtatcatgtctttcaatcaatcattagccttggacctaaaaggatccactgagaagatatcctaggcaagacagtagctcaagataggcaggcggtggtacacgcctttgatcccagcatttgggaagtagaggaaggcaaatctctaaattcaaggccagtcacaaagcatggtcagggcaacaaagagaaaccctgtctcaaaaaaccaaaaaataaaaaatgaataaaaacaaaaaccaacaacaaaaaagaaaaaacagcagtgcaagtctacctagtcatcaaaagaatgaagagtactagcaaggagtgtccattcttgttttatctttaatttttttctacgtttatttttattttatgtgtatggatgttttggttgcatgtatgttttgtagcacatgggtgcagtgtctgaggagacaaaaagttctggattctttggaactggagatatagatggttaaaaatagccaagttggtgctggtacttgagtctggatcctctggaagaccagccagtgtcctttactgctgagccatctctccagaccctttcttttggtactgggttttggaaaccaggacctcacacatgccaaccattcggcaattgaaccatatccccagcctgacattcagcttccataaatttctgtattcatcttaaaagaagaagaaaaatcaagatttatgaagccgggcatggtggtgcaattttataatgccagaactctggaggtgcaggtgaatatctatgagaccctgacacaaacaaaaacaataaaagatttttgtggctgagtgtatttatgtgcaccttctcagatagagagcattagatcctctgggacttgagttaggtaggtagttgttacaagtatgaagtgaattctggtccaacaagagcagcatgtggtgtttttttgtttgtttttagagtggtttttttgtttttgttttgttttgttttttgcgacaaggtctcactatacttgaagattttgtttggtgggctagagatgggatccagagccttgtacaagagaggcaaatgctctattactaaaggtcttactatgtagccaggactgtagatcctactgcctttacttcccaagtgcaagggattaaaagtgtgtgctaccatgcctggctgcaagtgcttttactattaagtcatttctgcaggcccatttttaagtttatacagtaagtcattagtgggaaaaaagttcactgcagttcacagcagtcacaatatggctgacctcgctaaatgtattaatagacatattttagtagcttctgaaattcaggagacttgagaatcttccgtattttttcatgtttgtaataaaacttcattcctaagttggacgcagttgtagaatgtttcagtttacataagacaatcttttggggtggggtggtaatacaggggggtcaaaccctggacttaaaagtgaaaacttacatgaaagccttctgttttgaaggcctatgaccacacacacaatctctattgggagacaccaccaaacccaaactgaagttcaatcctgaacagaacagcccaggtcaacggctttcctggcttcctctttcacccttaaatcctagggatgtcactcattacaggtcacaaggagtgttgtgacacagatctcagtaatagttaagtaccctgtcacatcttcaccctcatgaggcattttcatttgggaggattacaatccaggggctctagcagcgagatgtcggtttatacccagaaggtacaaaatccaaacgcatctcatgggccgtaatggtggccactgccgcttcgatgaccttcccccaaacctaagtgcgtgtgctctggaaacctggcctgcttctcagcgcctcccgcttagggggtgccggggaggggaggttggctcccgcaagccgcgaccactgcccgggacagtcccctagaatacagctggccagagcgggtcagtcggggttgggagaaggccagcaaaggatggagggacaaactgcctgaagacacgactcggagctacggaaaccagctccaggcgggaaggccacgcgcatagcacagcggaagaagcggagcgtggaggcggagcatgccccgcccgatgccgccctcgcgctaggccgcgctccccgcgggcgatcctgattggccggcccggttcccggcgctcattggacgcgtgggcgaggcggaggagagccgtgcgcagcggcgtgtgtggggccgtgtgcagacccgcgtgtggcgcaggcaaggaccctgaaaataaacagccactgctttgcgagtcgctttcctgggcctgcgtccgagtatccaccgctgtgggcagctcagacgccgaaggtgagggctcagggtgtggaccgggctgtggaggccgcggggttggcgcggccgagaccgacggagggccggagctacgaggcgcgatggcggccgcaccttggcctgctccctgctgcgtcaggcgcggggctcggcctggctgcctcctgggccctgctttccggcttgccgcagtagggcggccgccctggcggccctgcggcgcgggaacctagagccggtggggtgggggggctcgctcggcgcccgcggccgcgcaggcctcaggcgtgtggcgacgaggcccggcgcccttggggccgaggcggagagggtcgcgcgcgggcctagcgcccagggccagtgtggcgggaactcctggaaccgggccgtgtgcggggaagggcgcgcgggcgcggaggaggtccgcagcccgaccgcggggtggaggcctggcgggccatgtgccagcggctgcggggcctcgggaaccggcccgtgacgaagcccgcgcacgtcgcggtaaggctcaggagtctggatccagttctccatgctgccaacctttattcctcccgatcccttgtactttgtattcttaaacggcctattcaccattgctgcacgaaaaagcacttttccctgaatcggtaagattaaagtcttaggtccctggggcgggcgagggtgggaaggacccccccaccccccagtttgtcaggcctttaaggcaatctcggcggcagaagcctttgccgatatctctcggattaaacggacataaattacgagcaagcctcggaagtagaattggcaaaggtgaatctagattttcattagcgcgaaaacctgctttagaacggtctaatcgcccccacttgggttcgggtgttgattttataggtaaagcttttgcttgttgccacatgtcaagcacatggcttcagctaccaggcactttcagaggaagtgactacatctggtcttgaggtgggggtgggggtcttggggaaaggaaacgaatcgcaccaatcgtctaattccaagtttttgcaatattcttgagaacagaaaacagacaagttaaaccatgacactcaatttgtctgcattttagtaaaagggaattaagttatattcccattttctgtttgaccgagttttggagagattacgccaatgatttaatattagggttaaaattttcaagttcactagatgtttgctcttagtataaattggatgtaagatttttgtctttttttaaagacatataagctgtagttttatgcctaattctttaattctgggggggaaaaaacaaattacctgggttaaaatgcaggtttatcaggtaacagcccccatggttctaggtactttttaaaaagcttgttaagcttgcttcttgtctacaaggaactccacgctgtactataaaggaaataatttattggaatcctaagggctgaattaagggcttaatttcatccccaaattacagctcctggcaacaggttttaaaatctaacagtagtatatctttgtacttaccttctacttcatattaagatatatttgaataactcctttttatattggtagactgggaaaatttatttcatatacgcgtgcagtctgtaaaatgattttaaatcaaagtagagggagaccaagggattatattctagcaattgaacaactgcaatggacaaaatcataacttttaaagtattaaaaattttgtgatttatgaccacttggccttttagaacccaataaaattatctagtaaataaatcactgctagagtgatttctccattgggtaaattcttgccgagacagtttgccttcctcttcctagcctcctgacttgacagtaagttgagagccagaagactaataccaaggcatcgtggccagctatgtggagaatgctcttttccatactgcctcacttaatagggctcttattctggcagtgtctaatttcaggttgttaaatactaataaagtgaacctgggcctcaaattcagattgctaataggagtgctttgtacattagggaaacaagccaggtgtgatatgggcctatatcatctcagcactcttagtgcctgaactcaggaggctgaggcccatctcaatttgaggacagccaactaaacttaattccaggccagcaaaagcttggtaagagaccctacttccaaaagcggtagggtgtggaaatatgagagggaaatatctgtggaagattactgtgaataaatttaaaatgactgcagagtctttttggtttttcgagacagggtttctctgtgtagcattggagcctatcttggcactctctttggaggccaggctggcctcgaactcacagagatctgcctgccacttcctcccgagtgctgggattaaaggtgtgcaccaccaacgccggtcaactccagagtcttaattggtgcagttttatttggtttatctaaaaggatgaatattttgtgcgttggaatccaagtaatatataagaagagcgcatatatatatatatatatatatatatatatatatatatatatatatatgcttgtcacttaacccttaactctacacggatttagaggcaaactgttgacatcttgttagtacttgggtctacctgtgtggctttagtagataagtcacttgttctctgtgatatgttccctttttttgtttgtgttttttggtttttcaagacagggtttctctgtagctttgtagaccaggatggcctcaaactcacagaatctgcctgcctctgcctcccgattgctgggactaatggcgtgagctaccacagcctggctcaataacatttttataccaaaaccagtaaaggatttaactgtatatacagtcaagaataatagtaattctaataataaagcagtcatgtctagaatgaagacacagctcagtgtagagggccactaaggaagggtccaacctcaacacaggataaaaacttaactaccagcctgatagatggctcagcggttaagagcactgattgttcttccagaggtcctgagttcaattcccggcaaccacatggtggctcacaaccaccttgaatgagatctggtgccctctgctggcatgcagacagaagactgtatacataataaaatctttttaaaaaaatcttaactacctcctagaaaatgcattcatattatataataggaatactgaagagaaagatggcccttgccaagtatggtttgtacgaagctatctttactagttcatctggctttcctaacacaatggtttacattcctttgtgtgctctagatcagtttttcccgtgtgcaggattatctctaccgtatcagggttgctgtacagagaccatagtgcagttcttgccctctgaacgtacttggtattatgctcagtaaattgtcttagtaacacaataccacatactctgttgttgtaataaaattagttataataaaaggaagcaagataagatctgtgtttcgccctgtctcaaaaaaaagttattcaagatgaagacaaatagctataaattctgttacatatcctgtaaagtctggatatgttcaaagcctgtaaaataatcaagcctcttagttcaggatacctggcatccaagtgaatcttttccaaattacctgttgctcactgtccttttttaagtggaatggcctccatatctttaactggtttctttcatgaccatgtgaaacgtagaattcaggcatagagtggcaaaaaaatgaactcagcaggtaaagtacttaattacacagcaaaaatcaggtacctgagtttgatctctggaatccatgtgaagcttgaagagagttgacatggaagtggtcttctacaggatctgccctgctccgttgagtacagtcttttggtgggtgtgtgtgtacgcgcgcgtgcctgcctgatgagttcatgtgtaccatgtgcatgtagagttgcctagaggacagaagagggtatcagatcctgtgcgagagcaataaatggtcttaacagtcatctctaaccca

SEQ ID NO: 46 - DNA, 44734 bp, Cricetulus griseus
  >scaffold_72 dna:scaffold scaffold:CHOK1GS_HDv1:scaffold_72:1526932:1571665:1
  misc_feature 1284..1383: /note="n is unknown"
agggtaggagcagcctagcaaggggcttatccctgaagaaaactggcctttccttctgaggcagcagttgactgcccttagctttcagcttaggttggggccttgtgagctcttccccaatccatgctgggatgttgactggggtggttctgtgcatgtcttacacaggcagccataggtgttgagcgcccatggctgcagcatccctgccatgtccagaagatactgttttgcagcagtcttcctggtcctctggctctcacagcctttccacctccccctcccctgtctgtggtgttccctgaatcctgagtgcagggtttgagtcacttagtctgtgcactgtgacctgttgtggatctctgtaataactgccttctactgcaaaaagcagctttcttgatgagggctgagagctgccctagtctatgactctgtaggagcccgtttggatgctgtgtcagattagcagaactgagggagagggttcgcctctaggctctatgaccactccagtcatgggttcttcgttaagcatagcaacaccaggcacgagttctactgcgtgggtcttaagtccgacgagagggttgtttgcgctcatggctgagatgaagatgccaccattgggtacatcttcctggaccagtggttattgaaatgcacaggatatacagccaggttggtctgttgctaactttcctctcctggcagcctgcctagcgccctccagcagggaactaaccagcagggaggaggctgccaggtccatacacgctccatttctacaagtccttgactaaagtgtgtggtgtctttggcaatagtgtctacactatctactgtagcaatacaatagactatattatctgggaggtcccttggaccccccttaatgttctgaggaaaggctgacctcaaactcctaatcctcttgtctccctggagtgctgtgattaaaggcatgcatcacctccctgggctaaggtgtttcttcaatgaggttaacctttaaatcaatacagactaaataaagcatgttactctccatgacgtggatggaccttcttccagtcagctatgggctttaagagaacagactaaggttttctgacttagtgggagttctgactgcatgctgcctgcaatcttacctcttccattggtctctgcttgctggcctgccctgcagattctggacttgggagccccatgattcagtgaacaaacacctccctccctccctttctcctcctcctgactgtctcttacataaatacaccnnnnnnnnnnnnnnnnnnnnnnnnnnnnnnnnnnnnnnnnnnnnnnnnnnnnnnnnnnnnnnnnnnnnnnnnnnnnnnnnnnnnnnnnnnnnnnnnnnnntgtgtgtgtgtgtgtgtgtgtgtgtgtgtgtgtgtgtgtgtgtctgtgtgtgtgcgcacacacacatggtatttgctgatcacttaccatggcccaggcacacccttgcccattactcaatgctgccttttctaacagccagggctatttatcttctttcgttcttttctggcactttgggatgtgatcccagcagggtttcctatttgttggatgctctgtggtctcctcatcgaagtccctcagggtcctgggcagcagcaaaacaccctgtcccctgtgtcagacactgattgctccagcgtcttctttccaggccaatgccagttccttcaccccgaagcctcccgaagccacttatggtctcttcgtacagagacatcccatttattacacacgtgctgcttccttactggcaagtgttggtaaaaatagccctgcagccccgagggacagggtcatctgaacttagtgactctgaaaacatttggtgtgaatgatggaaagcgcagccgcagtggcggattctcctcaccctctttgttccttgtttgcttcctgaagcacaatgcttaacccctgttttccaagaaccaaccgagtaggtggattgctgggggacatttttttttttttaagagacgtattgttcttctgcatgtggaaaccatgaagctaagaataacattgagcaagagtcatcctgatgaccaggccctgctaattgtggatgtggtgttgcaatgtgtttggggcctttatacgctgcaagttgagcagtcctatctgaaatgcttggggccacatgtgcttcttttcaggtttcttctttcatagctgcgggtccgtagaaatatcttagaactggggtccaggcttttgtcacgtttcacatattcccgacatacatggcctgaggtgattttaggcaacatttctagtgatcggtgcggggaggtgaagtttatggtgtgggttttcccatttgggccgtcatgttggcccttaatgcattttggatttcggaacattttaggtttggggtttaggggttgggaatgccgggcctttattgagtgtaccacttctcatcgaactgtactttgctctgggcccaggataaccaacccttaaggctctgctctagtcaaggttacatggaccttcatggacctttgttgtttagaatggggaggaacagcagctcaacagtctctggagtgacccaggcaggctgctaacctgtctcagcaggaggcatttggccaggcctgtcctaggactgtgggtgttagcagaggtctgtctttttcagaggagcctggcccttcctctgcagtttaccctctcttggtttgtgaaataatttttggattttgtcatgccacaacatgtcctgtgggtgaatcctacatttaaatggccagtgccctgtgaccttcattgtgactccggagttcataggtttgtccttcacaggtcaccagcagctagagctaggaaggcgggaaagctgctttgactcattagcgtttgaaagcagaacaagtcttttcaaggaagcaagtatagcagagtcagctaggaagcctcttcacaagattcctagagacctagaacgagggcatggcttgccttcctgagtaggaagacctaggcttgagaaggggctcacaggtcatttcctatggactggtcctcaagtccaccccagtgatgctagcggctcccaagattctacagcactcccagctggaaggagcaggtgttttaccctgctcacttttcctgtcagtcatgattcttggaggtgtgtgtgtgtgtgtgtgtgtgtgtgtgtgtgtgtgtacatttgtctcattctttttcgtttactgtatggtgctctatagtgcttctttctagatcctatcaatgcctattctttttgatcatttccccctttatttctacttctgcctttaggcaggcaggaatagaaacagatttctgtttctcagagggtaaactcttcaactccccttgtatgctccctacctgctaaccttgcatccatccatccatctacccatccgtcatccatttacgaagaccactgcccatagaggcgctggcatccggatccaagtcctaagggtatgtctccacgttctatgtcgaaggagacaaagggaagccccagaaaggattccttgacactggctccttctgcggcctgtgtggagtgtaggagagccactaaggcaggcgatcaaagggacagtcagccagtggcccacgggtccctcttctgcctcacgggctgttcaactctccctcctgtggcatcccgttgctagtttgtactttgctcagaaagcaggagggtgtcttctggtatgaggctggtaagatgggtgaggggaccctcaagcacctgcctgtgtgtgtgtgtgtgggggggtgtctttttttcttggcctgagggagagccgaattttaacaatgttgcaaatttaaagccttgggagaggactggagacttcccgctattctctgcagagaaaaccaagcagaaatgaaccacacaggagtcgcttcttccagataactagagaagaggttggcatgttcttttattgttcccacaggggtaaagcattttgcggtgcccatgcttacatctccttccggcctgcccacgctttacttcttaccgagtgtgtttatgatcaccgtgagatctacagagtgtgtgccgaacactgagctcattgagtttggcctgccgtatctgacagcccgctgggctttgaacctggtgagcagccactgcaccggtgagtcaggaaagctctggctccctttggtttgaggtgggggatgtatttaagtcttccttccagggacattaatgaaggaaaatgaactatgcctggcaaaacaacttctcccttaaacagtgcctggcacatgggaagtggttagcaaagtgatttgttagcatgtgtctgagcttaagcaacatcttcctatgaaggccttcccaaaggttttattagtttctttttttttttcatttgtttgtttgtttgtttttggcttgattctcttgacttgtaaatttctgctgaattaatgaagggctgtgtaatctgttttggagatgacccccaggctcaggctcgggaacagagaaggcaaagtaactgacccagctcctggcaggcaaggtaatctaaatcattaataggtcactgttggaaggaaaacaagcaaaactgaggaccttggctcagcatgggacccggcgaatgtagcacgtaaactcttgtggtcctcagacatgcccgtgtccctcgcctgcctctcaactctgtgtcagtgttatcaatatggaatgcccattctaacagtaatggggccacaaggctttgagatggcaagtaggaaataccaagcgtggtgtgtttgcaactgggtttgttattctcattgtactctggcacactgctctgtgctaacaagtcctcttattagccattcttatctttgtgcttcctgagggtggggactgagagtcccattcatagccacatccccaccttctaaggcaattcttggtatgtgcttgcttgatacacaacttttaaaagtgcatgaatggatggcataaatgaaacaacagacaggcttgggctggtgtgttggggccaccctagtcagttatctggggttgggtttccggggggttttatcccctcttgtcagattcaggtccaggacaacggttcaggttctattgttcccagatagcgcagcctatctgaatgtccctatgggcagccctcagtcacaccctgtgctcgtgtcctatcactggccccacctggaccccgtgtggtgggcctggggacagctttcatgtggccggcatgactgctccttaatctcccccctgtgtgaaaattcatggaagacagcatttggttctccttcactttctgcacttcctggaggcccagacagtagcttaaataagtctttggggcagccttcaaacttccaacttgacctcaaatagggaccttgcctgaaggcctcatttgtattcccctttgccactgggtaagtaagctgaggcccccaaattgtctgatatctaggttacataataggagtaaaacaatctgaaattagaaccagccaatcacccctaacccatgtgactgcttttttttctcataagggaccccctatgacacttaatttgttgctgttttctgcctctaattacttccaaatggacaaaagagagatgtcacaaaagagatggtccagggtttgggggtggggggtatctgttagtatcatgtgtcctccaggctatctgaaggatgtcttgggtgtgggcaccccaaggaactgaagtacctcctggagattacccagctcaatgccgggtaacttccttcttcagttttcatagttgtagttgttaaattggggcacttttctaaaatgggacgctctataacttcttaaaagaataagctgagaaagatatgtatatgagtttatacatatattaattcaatgtagacttagaagatggacatatgtaatatgtatatagcatgtaatttgtgtgtaataggtaggatttttatctgtccattaaaactgttcaattatagttactaatcggggtaatgaagtgatggggaacattgttctagcagagaacaacaccatcctttagcaatgttgacctttctttttaaagcagggtatcgaataacacagtgttgaactttcttaacagctgctcattaacaaacaagcagccatggcccccatatcagctgtggaatctactgcagacctaagtccccttggcatggtctgttatctctgcctctttgctgacctgtcagtcactcctagctcaccaatcatgtcatgaagtctaatccagcattgcttacagatacagtggtattaccaggaccaagccggagcagacacaccatagacttaatgaatgaacccacagagaagagaggatttccccctacctttcactcctacatgcatgaagccagtgcctaagtcctttgtccctctctggacccatccctgactacccttccgctccttgaggagtaccctgcctcagcaaggctccttcatccttcctgggctgcagagataccaggagcaaggaatgagttgaaatggacctttgagactgaagtgtagagctgccattgccagttaagtcaggcacgtctgacttaattgattaatttagccattggagcagagccagctcagaagcccggattaacctcacatctgacagtatgctggtgagtcagaactgttggggtttttgagcctgcgctctgctatggctgctgggtgaccttggccatgttacatacccttgttgaatctcaatttcctcatctgtgagaagagacttacgatgcatctttggaggtcccagagaggagaagctatgctcacactagtgcaggtgccccttcggagacggagggagtgcttattgtgtgtggtgctgaggaggttcctgtctttctcagggaggcatcccaaggccagatcagaagagggtataatttgcctcttcttctgttcaatgctcttctcagaccgcccagggtttgcagcttaagcaaataaattctcctgctccagcaggccctgtgttctggagctggccatatgtcggaggagatagagattgttatctggtagagtaatattacccagcaagggatgacatttcttatcagaggctctgaggagtcagagataggcgctttgcttttcactggctgccagacctctatgtgctgggctagcagggagagtgggaaggccttgccgcccaggggtggacagccagtgctgttgcaggcatcagctggtctccatcttgtaacaacaaccgggcctgataggccgccttgtcagaagctgggcctttagagtcttttgcatttttgaatgcactgatagccaccaggcagaatgaggaaggagaataggagtgtgtgaggtggtgctggccaattttgggtggagacagagccatggcctttgggggacctccccttctaggaataagcaggcaatcccctgatgcgtggaccacgcctgggtttctgggttatgggtcggtagggttggggagctcagatccttgtgccaactgaaaccaagctgttggcattcctcgatgggcttcccaagccagcttcctagaactcgctgccttgagctttgtcctggaatgggagggagctgtctggacacagtcacagggtggcggcaccatggagtcccatgccttttgtttggggggagggggtactgacaggataggaggtggaaatggagtttattcttcctctgatctctgtggctccttttctaatctgggcagcatctacacagaaggccctggctttgaaacccggctttcgttccttgtgatatttgccaagtgggcccctttcagcctcagtttctttgtctatagtacgaggaggtaatatcacatccttccacgactccatgactagttttggggccctggctttctgaaggaaaggactctatgaggtccccagagagctgttctgaggaaaatctcacgggagattggctaccataatggacacagtgaaccacatgcattgggagtctggctgctattgtaggcacaaactcagggctcttcccttcctggtttttgggaagtcttgttctgtccagctctgctctcaagtaataatcttgcttcatcaaaaggaaggagaagtggttttctgtcttccgggaccccttcccatcagcagttcctgcctctgcttctttcctggtgggcccacatctctgtgtcctccggtgggtgtctcctctctctcatgcttgggccttatcttggggtgttgagggtttttttttttttttttaattttactcagttatgacaactctcacatttttcctcaatgaccaaggccagatacttaaagcccaggtctgatcacgcccctcctcaactgaaatgtaaccaggagctccctgtcagctttgggatcacaagcacacacctcttgatatcatcgtatttatggctcccatcagcatcacccatccacaaatccaacctggtcacctttgacacccccagtgtcaggtgtcggtcctcaaaagcgtgaaaaggaatcttaaacgttttcaactcccactttctcgctttgatcctgtcgtgtgtgtttatgctgaccaagtctgtgcgctccggtctgaatccaccttcttctctgtccggctctgtggctgtgaaggtacttgtcccctgcctgccagcttttggtcactatttgaatcgactttgagcctctctgtgttcttagtgatcatcttttttttttctcctcctccttcttttgcgatagtctttcttacttcctccatttcgggaatgcttggattacaggtttgagtcaccagtgtctgtctgaggtagccttatagatagagtaactggatcttgtttttaaccatccagctagcctttatttgattggacaatataatctatttgtatctaatgtgatcaccgatgggccaggatttgctgttgcaattttgttgttttttttttttccggctgttttgtcctgtcattcctgttcttctcacagatccctctttgtgattttgtaacatgtccttgcatggttttgctttttattctcgctctctgaggatctagccacggtggaatttttctttgtttttttttttttctccattttatcataaagtctgttttgagttggtggcagattcaactgcacgtagacaagccgcacttttgttatgggtgataattctgatctctactattgtgtatccattagcgaacaatcaaagctatagttatcttatatttttagtttcgcaaactgggccgttgagttgaaagcgacttctataccaccattgccgtgtttttctgaacttgaccatttccttacttctgttgtgagttctgcatccgtgtgtcctttcatttaaactcgaagggcttcctttaacacgtttttatagacaagattggtggtgctggagagccccctcttcttttgtctgtctaggagagcttttctgtgcccccgtttctgaaagatagctttcaggtatttgattggcagttgttctttcagtactttgcatctgtcatcccacactcttttaattttcaggatttctgctgatagatctgcagatattcttgtgtctgttcacctgtgcatgacaagttagctttctctattgctgtcagacttctccgtctctggctcctgagaatttgattataatgtgtctccattgagatctcttcacaataaccagactgggggtctttgggactgggcttgatatttattttcttttccacttttgaaatatttcctatgattttttttttcattgagcaagctattatcagcccttcttctcttttacttgatggtttactagaaggtttttgtcctcctttcatcattttgctcccaactagtttcaaatgccctgtctttgagttcgttctttcctttttctagttggtcaagtctgctatagaagttacctatggattttttagtttggtcgttaggtattggtgttaaattttcggtttggttcctctttttgttttcaatggctcttgtctttgtttacttttgtttgtgtgctgttttctgatgtcatgccatggtgcagctgtagtgttttgtgcttcacagaaattcttccagacagttattttgaatttgttgtcaggcacttcatggatattcatttacttgacgtttgtttctgtaatggtttacctgagtattcatgattcttgtggtcttgtgttggtgcgagtctatttgaagattagctttagcagggaaagacatccactgatcagctcatccacatccagaattggggtgtgctggctggtaaagtctgctggaatggtgtatatgttgggatgccctgttacctgaatgattgggcaggtgggcctgtttcttgcgtttgtcggagccaccctggagcctgatgtcatttggataagcccagagtttaggaatctgtgtttaagccaaatgtctgggtcaatgggtagagtctaagacctggattgctgagtccccgagggttcattctacatcaaatttcaccaggggattttcattgcctataacctagagcctgggtttatggaattggcctgggagtggagttagggtagggcaggtgttggagtcttgtcaaacataggggtccttactctcttccctccaaatgaagggcaactcctttcagggtcagcaggaggagggttgatatgggacagtatagagctagccctcattcctttttaaatgtgtcttcttgtttttcagttccacccagatgctgtaacctttctctgggattccttagcctttgtggttaaatgttgttcaaactgatcttcctgtgaggaacagatgctgaaatccctattctttcgtcttgatgatgccacttttgtcttcacagcataattgacaaggattcatttgcttctgtttcattcctgtctgcctccattacaactaaaccttggaaaggataaggtcaattttgactactgtagtcataacaacaaaatacaacacaacagtactgttttcatactgtgtgcttgacaccatggtaaattcttcattgtcaccaatttattttatccttgttgcagtatagttaccatcacagcattcatttttacagatgggcaaacttagaaagagaggttgactgctgtgttccacccttccgtctggatgggaaatagtaaaagcaagattcagaagctcaggttaactccaggatgctctcaagctagctccggggtgctcactcttaagccctctgctatgttctagtgacttctcagtagcagcagcagcagcaactttgcaagcagctgacacgtgaatcaaagagccatctctcttttagtctttgcactggatgcaaagttggagcctggtaaaacataagggaccagagtttgggaatctactagacctgaattgaactctgggctctttagctggcgactgtatgcaaactaagttcactgagcactggccaacatggggacacatgcctgtttatcctgtagaggatgtttgcgagccgaattgatgtgttacagtgtgtgagcagagagggccaactgcccattaggggttctccttttcaagtgtaacaataccacatccttctctggtaagactaggtggaagggagaagacagcctagtatgggatggccttcactgaactcgacagggaaccaggaataaggtccagttcctgtaggacttacagggattccctgcccttttggttcagccttagggattaagtcacagtagccactgactgattgtgaagattttgggtgactctgacccaagacacagtcttaaaggtctcttaggtagttttggctctgtgacactggctgctttctcatgtagagacgacgctgccatcctaccccccagctttcccaccctataggctctcgaaggaggccccagataggctttttcatcctttccaggaaacccaactaggtactctgaaataccattctcagtaaggcttgcctcggaggggtacttcatttaggcttcatttctttctacatctgctccccagtgctcagggacagctctgcctctttccataactcgtttttttcccccaacctttccctcattctggcttccagctgtcaaagaacaaaggtgttggcctcttacaaagcaggctaccttagtctcagattcagtccctgaagatggggaaaaaggccgtctggccttgtgacagccctgggcagctgactcagcctggatgctggacttgccctacagttatccctggaaagccacagaaccttcttggccccaggcctggaagagagaatgtggcctcgctgaaagcaacagctcaagctggctgcgtctccatcggtttgctctccctcggagtattattgttcctttacttctgggaatctttgcagcccagaacgctgcagcctgcccagacgtaataatgcctagtgtcacacagatttaactctactcattagcagatgtaagttcttaaccatcattcttcagctacctacttgcttctgtctgactttcttcatctattgcttcagttaaagtactctgagagagggtttgttcaccattcagggtcacaggccatcaaaggagggaagtcccagcaatgagaactagaggcagcagctggccacattgcatccacagtcaagaaatagagagcggtacatgttattctccgcttgccgtttctctttttcatttggtccatgtttctagcccacaggaacagtgccaaccacaagggatggatcaccccacctcgattaatctagtcaagataattccccacaggtatgcccagaggcctattttcttgacgattctaggcctcttgaagttgacaattaagactgaccatcagaacttccagtcttaggtcccttgtatactagtggcatggtttgggtgagattctaagtgattctgttccggcttcctcatctgtagcatgggatgttgattgtctttggttgtttgagctgcttgctacaattctgcaagcctcccttataaaactgcgcattcgggctggagagatggctcagccgttaaagactaggctcacaaccaaaaatataaaactgcgcatccatgcctttggcgtgatggcatagcatgtttgtatggaacttatttttttcctggactttgggcttgtgctttatgggaagccgttggtcttatcatccaagtggagaatggaacgtgaggaaactttctcctgtaactctcctggtgttggtaacaatgtgcctttggttatgggagtgtgatatagacacagaataacgtttccacaagccctgctcacatccgccaacacctagcggagcagctgacaggagagtgaagaataagctcttgttacccagctacacctccagcccctgctgatggtaactggggccaccaaaataatatggaatcatctctttattccagacaagtcaacaactccgactcaatttgcagcctcaattcccgtctgccgtgttacccgatagtcacagatttgagggattgctgtatgggcactgttacacggccatcatttgatcagcccgcattagacacacacagtactgtatttccgttgatccatactggtattagaagccccggtgttttatttgtgatgtgaaaatgaggcggcgtgtccttgatgttgccaccgagtcgtctggtagaagggattgttttactggaaatattgctctgggacacaggtgctgtctcttgccagtggactgcgtgcagcaggtttaggagacagagtaaagtagtgtaagagtcttgggtgcctttgatacagagacgagactcctccagttgatgacaattgccctgagtggttgttgtgctgggttgtcctgctgttcctgctctcccttagtaggtagcactgtaccagcataagggatgactgagccgtctcagagaggcagaggggccgtaggacaaggctcgggcagccagcttccatctcccccggccaatctggctctgtccttgcagccacgggaccctctgatcttcccacacacagtggattccagggaaaaagaaacttcccggcctgactgataccaatgtgaaggaaatagctggctttcatgggggcaaggaaacaaaatccagcaagagtgataaacctttcactggcctatgttctgctgagtagccagctgcagcaggacattgagatttggggcaagggtgtgaactctgaggtgctatgttagtcacccaagagtgaagaaagggtgttgtgcgtagggggacgagaagagccaggatctagggtttcccaggcttgtgaggtcccaccgtaggcttaccgtattgctcctagaaagtagacctgtacttgtcggttctggtagctgccttatctgtttagctggcctctgccattgatcagaaatgaccataagtcaagctctcatttcttccatgcctgaggctctttaccagagatatagggttatgttagtgttaccgtagagccagaaaaaggtgtgtgtgtgtgtgtgtgtgtgtgtgtgtgtgtgtgtgtgtgtgtgtgtgtgtgtgccagatactgtgtttagggatataaatatatcatatgttcatattcattgtgtttgctgtgtagttcataattcataattcatttctctgtttataatacacttataacctgatgagaagtcccaggatgccttcctgtggctcacccaatgttctttgagaaaattttctggttggggctgagagttggtactcagaggcgtcttgaatggtagtttcctgagactgcctaccacctagtagcctcttaaaggctcccaagcctgcctttggggacgcgtctgaaacagatcccatcttataccatacagatcccgtcttatacaagttccccctgtgtccaatctgaagtcagacggagacttcaatattccacagttcaggggcattttgatggaaatccgagccacttctctcctggcggactgcaatctctgcttccacaactgttcatgtcctccaggggaaaatctcacatatgctccatccatgtgtaggtaggcaccggctcgcagggtgccccatgcagacatttcctgtttggtcagcctcgccttcatccctgtaagagtcaaacaccctcaccttacccttccagctaagggcagtcagaccaccaaggtccctctgttcataatgagtctctttcccatggcacagcttctaaatgctttgtgagttcgctgtggccttcccctggctgtttcctgagcagattgtctaccgctgtccctgctgctggggagggatactattgattctgaagccaggagacaacaaataactttcaaaagggcagagagccagacggacactctgcctcccgccccaacacctttcctctctactgctccaggggctggagctctaaagccccagaggccctaaagacttctttaatgtgtgtgaaaaaatcctgcagagaaattgtatccaatttaaaatgtacagttcgaccttggggttacaaacaagagccagaaagtcatgggctgctccggtgccgtctgcattcaggggcacatgaaaaggcgtgtgctctcccttcgaggtatggtgccctgaaagccacctgcttactctttctctgtaccatgttccatgtggtgaacgtgttttctaccctgcctcttagtatccatctctatttgaattccttcgtgttagtctttcagaaaggcgttatccaaataactaagtcttcccacccggtgtatggggaagggtacagttggcagggtactttctgccctcaggttgattctcacagcaccaacaacaggttatccctcaacacacacacacacacacacacacacacacacacacacacacacacacacacacacacgcatgagagcatacacatgtacacacacatacacacacagtatatacacacacacgtgcacacacaaccttgctcataaaagaaatatgcccagctgcaaatccattccccagtctcctagtatgctgggagtccttctgtttagcttctgcaaagatgagggtgtgggaacctaatccatatccaagttgtggtgcaagactgcacagctcctcgtgacctggtggtcccctaagcaagcaccttattaatggaccattggtcctctcaggtggataatgatttgcctgacgagccttccttccaaaacagaaacgggtccatcccatctgccaggattctccagtgtgtatccagacttccagtgcctccttcagaaagatgcacaggaccagtgaattaatacagagcaatccccacctaccagttaaaccctatgtgctttctagttcatactgtcttgacacaacctagaggcggcctggaagaggcagccaaatgagactggcctctccaaatctcagcacaagagagagtgtcttgatcgatgattgacgtgggagagaacgtcatccctggggagggtggcctgggttgtataggaaatccagctgagtagtgtcctccagtttctgctctgtggtgagattgtgtttaagatctaacaaataaagcttgcctgaagatcagagtgcaaagctagccacagccatagaggccacgcattggtggcgcacacctttaatcccagcacttgggagacagaggcaggcggatctctgtgagttcgaggccagcctgggctacaccagagtgaatcattctaaaagagaaacagagctcacacaaaggtgatctccgcacttggggtcccaggcctttaatcccagctctagagaggaatacaaggcaggaggatacaggagttgggggcagtctgaggtttggtggatcaccccttcaatttaagcattggtggaggtaagaactcgctagtggctggccgctttgtttctctaatcttcagccttaaccccaatctctgtttctgggtttttatcattcactctgcattgcttcagattcctgccttggcgtcccttgatgatggactgtgtaacctataggataaaataagtcctatcctcctataagcttctttggctctttcctcctccacattccacctgtataatctgctaaacacaatgccacactcaaggaggccatcagccttacaaaagaagctgagatcagggtcaggaggatggaactagctgagttctgggatttagactctagagagaaggaagggccctctgggaaagggaacaaatcccagagccttctcatgggaaagagaacttagtggagccatctctgttccctggggacatggaggtcttaggccacaataccaagcaattgtcccattaaatgtcctctgcagctacattcctatggctctccacctattaccgccatctccacatgggcggattacaaacatgtccctttaaaacagctttatttagacagaagtcacataccatgggatttaccaatcctcaaacatactcgtttcctcaaaaagcaagtctgggcgctttagctaccaagttcctgtacctctgtctaccccagtcacccgacctcatcagggtgcttgctgtgtctttggactggtccactggagtcattatctttacagataatggaatcctaccctttggggctgacctcttccacttagcatagcttttcaaggctcagtcatgttgctcaattacgttgacttcatttttttatatgatggatggagattccattttgtatctatatcttattttattttgtcaccatcggatcacctctgagttattttctttttctaagaataggctactctggaggttcatatgcaagttttctcatggacttatatttactgtagtatgtacctacctaggagtgtaattgctgggccacagggtgtgtctctgaatgacttttggggggatctgccgtacttctgcagaacgtctctgatattttactgtccctctcaaactgcttgttctcattcctgtttctgctcatcttaaacataacacaggcttctgttctgtatggagctttaactcatatgccaaattaataaatagaactagaaataggtgtggtgttgcctctgttgggggtgggaagggccaaactgccttctgggtaggcaatgttctgtcttgtggtttgatgcatttgggacttcccaaaggcccctcccccactgcaaggagcatccctccagctgagtgcatttcctctggaacaaagtttaaaaatattttttcatcattttctattattgggtataaaacctttcccttatcttcacccaggaggttgagaaagccaactcccttttgcctgtgtgttttctgcggcccaactgtggactggagagagttccacagagcacaataaccctaaatgtatgcatagcagagaaatagaaagaaacagacataagtgggagacctcacagaatacgcaaaaatatttgaattaacataaattcacagatgcggactgagcgagcactactgatttccacattcaaaaaatcaccattacataatgtttgatagaactgcattaattgtgttgttttctttataggctagaaaaacatatttgactacaagaaagtattatgcaccgtactttgctggaagtaagtactgcatgtttttgtacctttattcttcatctatagctgatttctttctccctggagaccactttcgtactgcctgtgaattcagttcttagggagttatttggcttgttctctctgactggagggttcagttttcactggccctcctctctttagggtggacttctagtcatctctctgtgttctgtcctcagagctggtatactttagggtcccatccagaagtggcatctgccatgaggaggtcaatcttgggatttgatttcctaggatgttctttttgtccttgtttcctcattgggaggacgggacagaaaacaccctcctcagtggccttacgttgaagatgtatgtggcaccaccctgccttgaaaaacagcacttaacaagtagcagaggctatatgattctgatcactggcatctctaacctctatagagacttggaagcatatgctcatggctctctctgtgtgtgtgtgtgtgtgtgtgtgtgtgcgcgcgcgcgtgtgcactctcgtacacgtgctcaatgctgtttgtgtgaatgtctgtttatatcctgactcaggtacaggaagacaaaccacctgttttcacccacatatttactaggaaggagttggtctcacagaagtagagggggtgggcttgttggaagagtagagatctgtgatgtagtagtgatcaaaaagataacattcctccagcccagtagaagggtaagttcagagacttgtgctatgtggtggctgtaattctcagtgccgccttacggtcctgaagaatgcttagaaaatggatattatattcatcccccaaacatgagagctatatgaggtgataggtatgttcactggctagatttcatcatttcacaatgaatgtacctcaacagcaccatgctgttcactgcacataaaattttacctgttagatttctaaaaagattacacaaaacctctgtcccctggatgaatcgtgattaatctcaggactagcgatacggttcagttgacagggttgctgcctaactagcacacatgaaatccaaggttcgtgccctggcactgcataaaaccaagcatggtggctcctgcctgtaactacagcatttgagaagtagaggcatggcgttcatagttcttggtctgtatagtaagctcatggcctgctgtgggtacctgagacccaatctcaaacaaaactacctcatggagctagtcaacgtccatccctggtcaaaggtgaggctagtagtagcaaacttctaggtagtgtgagtttgttatttcctccctcggtgcaggttcttggaaggggggctcagcctctaagcattgctcagcgctgtattggaaactcttcttgccaatcaggatcttgaacttgacctcaggtggaagcgaacattgttttctgaggagggaggaggggcctggcagaacgtgagtcatggctttgcaacagtgtttaccctttcagaatatgagcagagtcatacttaacacagactacacacacgatggttttcggcctccaatttattgggcacctttgtacccaaccatcatcgtaaactgactgcctgggacctgttggtccttttgatggcagtaggtttcagttttcaatttgccaccgctgattcaggaagcttgctggcacgaagatactgagcctacacgagacttgctagctccatgcagctgatgaatggcagtcggcacgttttgcaaacgttttggcagatccgttccaccatttaggtactataaacagcctgagaccgacctacacttaaggcttcacacacaagtttgagaactaacagataaaagtattagctctaatataaaaagcaagatgaaaggtggagatagttgtatagaccttcagatcgatttctccagtgacgctagacaggttgaatttgagatgtatcttcctgctgcaagacatggccctcctgactcaatgcaccctgcgagataaggctggacttgctgccctggtcagaggatggcatctgcctagatccctgagagggaatgaattctgagatggcatctgggctctgcattatggactggtgatgactgcaatgcccgcaggtgacacccagcttttctgctccttatgactccttccctgcttaagtttctgaaaatcgttcattaggtggtggggggtggggtttgtggttgctggatccctgctgagagccagtctccccacacttggctttcaaccgcacaactttgtgcagtgtttgcatctctgtttcccaggtaagaatcctctgcctggctctcagagtcttcatcattctgactcctacaccccttctccagggctccattatttcctttctgttgcagcagcagcacaatgctcgctctgaacacgtaaaactaacctccctctctgcttcaggcactcagctgctgctactcactctccaacttatggctgcccttgaaatctggttttcagaggatactacacaaacccactgtgatcctgaactcccgtgtccagagcatacaggacccacactaagttaaaccttgacagtctgattttgttgtgttattctttattcttccacggttgcctagccttcctcctgttgaagtcttggcttcctaactagattatacaccccaggaatgacttccatcatgcagtgtcttactgcggtagctttgcattggcagacacttgagaaatacattttcagagtgggttagctcgctggtgtgttgatgggggaggaacagaagcaatcatcgaagggtcacaggccaatcttacctgttgtccagcccactctgccttcctccttccaggccatggctcgcccagttcaaatgtgatttggtacctacatataatgtataatgattaaatcaaggcaactggcctttccaaccaagcgtcactcgaggaaagcaattcctaagtcaatgtgggccacagagaattacagccctgcttcctcactgtcaagttgactgtgcttagaatcacctctgagatgcaactctgtgtaatgataaatctttccaccgagttgcccgagccccgctgccacgtgggcgcccaaaatagcacacagagatttatattaggtacaatgctgctggccaatgagtaggattgaaggatgtcccccgtcagctctgggtgtatcttttagaagaatttgcttcttgttgttaattgaatgtgttgtttgacaattagatacaggtgtatatgtgttcccattatccttgactccatcttctcttgtccccacccctgtgaatttccctccctgcccccgactggttctttccccatgttcatgttttttgttgtcatcgttgtttccttttatggctcccgagtttaatctaggacctctgagtgaccacaggtttggagctacacagttcacctgctgtgtcaccaataggtattcatttgaaggtaacaattccatggccctgagaacatctagtagttcctcagggaggggtggaccctcctaagaccctctcccctccatcaatagccgtcgacaggtccagccttgtgtgggctcagagcaggagaccaagcttataaccaatgagccatttcaatccctagtaatcctgtttgggtacccttagttcctatgagagaccaaccttttcctgccatgggcccaggcttacattggtctcctatcctctttctgttccctgcgggtagatgtgaggtgaccgagtctagttttctgatgaacaccctgcacccatgctggggactgtgggagagcctccctgctgtgaagccggcagggaagtgaatgagtcataactcacaggcacattttgtttcatgagtgttgtcatattgtcttccagaatgactgtaccaacttacacttccatcagccgtgctcagtggtttctgtttccccatagcctcaccagcacctggtaataagatgtgtgtgtgtgcatttaccataataaccatgtcagggcagttggttgactcttgtgttggtccctttacttgacacagaaaaatctccagtagaaagaaatatcgggtagaaaagaacacagctctttccagaaactccctatagcatcccccctaagtccgtgttactgtgtagcttggggaaggtgtcctccaagccagtccccatcagagatgacaggattgctgtggctgcttgaagaatcgacgattctgattgacaaataccccttttgggcacacccctgtctgtcttaaacccacacaggactgggactaatgcaataagcaggagagcagaggctgacttcactctggccagattctgaagtgcacacggcctggtctgtgcaagcaaccttccctggggaataggtctgtccggctcatgttagaaacctaatgttcttgagaccttttacgcagcaggtagccatcagacccgttcccgctccagctgtttgagctgaggtttctgcaagctctcaatacagaaagtttcaagggcagtgctctggccctatccaggacaggtgggagggacacctgccaggggccagtatctctgtaggccactacttcccctctcacccatgacatggacattccagtaatccttgcatttttctctctgaccaaaggggaaaacactaattttaagtgatacccaattgttaaaagtttgtggactacttgctgtctgccaggtggctcggagaatgtttcatccctatggtcccatagaagtctccggacaaccctctaagagacccactttcaagccgggatctggttccatagtggaggacttgctcagcatgcacaaggctctgggttcgatgcccagtgcccagataaaaaaagaattttatttctggaatttattagcagggtgcctttaagcaagtaacatcactgagctattccttgttattatttcaaatcctcagcgggctgagactataaaggatttagaattcgctcaaatattagacacttcttataatcttaattttaaaaacggagaaaccgggaggctcagaggtatcaacttattaaatttgccagacagctctgattaacagagccacaattgaaggccggagtgtctgattctagagctgcactttaagtatcctactgactctgcacatcaggtgttcgagtattcccaggaacagtatcccatcttcctctgcaggaaaatccatccctactcagccacactttttacaaagaacatctctgcctctgaccacaggcatagcaatgcttccaagacctggtccatttccgtggtcaccagatacagagccacacacctaggaggttactcatgccagacatgggagcacctgttagacatctctcgggccaagctgaattctgtgaatcaaaggctataaggcaacgatgatattgccggttctgggtgtcaaggaaggccctggtccccctgaccagcccttttcacacagctcatagtgcctgacactgtctagaacaccacgtgattgtgtacagacttcaggttcctcagtattctggcatatgcgatcctaacaataaccctatcttattattttttttttttcagaagagaagcatctacttagagataccaagtaactcggtgcaactgctaaatagcaaagacggaagtcttcagactggaggcaattctataagacagttgagccttccagagctggtaggtgagtgtgcaccctccataatgctgtgttcccggagctggtaatgaatgaaatattggatggtcagtgtcttcctctgacctcctaatcctggattacttttttgtttttttcgggggatggcatttcttctctgtataacagccttggatgtcctggaactcactttgtagaccaggctgaccttgaactcacagagatccacctgcctctgccttgtaagtgctggtattaaaggcatacaccacaacgcctcgctcctgaattcctttttaaaatttgttttgtttttttgtaggggactgatggaccttctcaggagacagatccagccatgacattggcactaagaaaatgagacactctttccagaaaacacaggaggtttctgaaactgtgcctggaaacttggagaagagagaagagagcactttccctccctggtcagggaatctctcaccatgctcaatacttttcaccagggtcattgctgaattgtccactttcaatctaggtttgatggaatatttgcctggaaattttactttcaattaaactcacttattgaaccacttctgtcttcaaaggattccattaggataggtaattatagctattgctataaggaattatttgcgctcaatgtcagcttttaggcaattcagttcaaatgttttatatttttactcttgggaggtgtgtgcaactatcatcctcttatactgcaggcttcccatgggtttttcttagaaaccccaatcaaaagagccattttggtggtgaacgtctctagtcttaactttaagtgctgatagaaacagccaaaaacacaatgctatacagagcaagaaagacgctccccctgtttatgcagagagttggaaagggtttggaaattctttgcagacaaactaaagccaaaagcaatggaaattccttccatattgcagccatttgtccttctaactgtcggtcataattatggcatttcaagatggcagccatggaagagtttagtggggaccctgttttggtgtctgtgtttccatgaaatgggaattgctttctatttattatttgtgtgtatgctgggtgtatatttgtatgtgtgtttgtatgtatgttgtatatgtgtggttatagcacagatgagatcaaaagccagcttttgggggttggtttgtccctttcgtagtgagttctggaatacagctccggttgttaggtgtttatgtgaaacacttttaccctctcagccatctttgggctgagagcactttctttgtattcctaactctgccctcttttcttcttcttcctgcagacatgtgccctacctaatgcttgctaacctactctttccccccggaagttaagttctcagtttgtagaccaggactgcactctctcccgtcacatgcctacctcataataggtgcttgcatgatgaattgacagatgaatgaatgaatgaatgaatgaatgaatgaatgaatgaatgaatgaatccatgaatcctctacgccttttattttctgttttttggttttttgagacagggtttctctgtggctttggagcctatcctggaattagctcttgtagaccaggctggtctcgaactcacagagatccacctacctctgcctcccaagtgctgggattaaaggcgtgtgcccggctttattttctgtttttgaaaaagtcagtattttattgaataaacattgaatgatggcattcgtttctaaaaataaaaaatacacccctagaactttcccaagaaggctgacatacctctaatgtatctttgctgatctttgcctcatccttatctctacatggggaataatttgtcatcatcttggaacacatttttttccttcaataaagtgttatcgagctaagtggatatgtcacctttgatttgagccaaatgaatctgtgtgtttttaggtatgcgtgcacatgtgtgcactacatggaacgatcagatgccagtcctggatgctgtttctcaagggttcactatcttgttttattttgggttcttccccacccctccgtgtgtgtgtgtgtgtgtgtgtgtgtgtgtgtgtgtgtgtgtgtgtgtaacaggtctcccattggcttagcactttccaattatgatattgctagctgggcggcatgccccagggatcctcctgacctggcatcctggtactgggattgcaaacatgtaccacacccagatttttgcaggggttctgatgatcacacttaggttgttacatttgtagggcaagtactttaccaactgagctgcctccccagtccctcaaatagcctcaaatagtttttcctgactgtattttagtcactatgtttcctggtgcttttcttttcttttttaataacttgaccagataaccgtagcatcttttgtagccacaccatatctcatcaaaaccaggcaaccaccttggagattatgccgaagaagcaaacagaactgtgcaaagttctgaggctcgccacagacaaagaaacaaaaatcacttgtcttaaatctcgggcattgtgccccaagtattccataatagtggacggtgaatgggtgacctaggataagataatttcctctccctggaccacatattttcctctgcatagtggacttggggtcttttgaaagcactagggacaataatagatctcccgtggtgtccctgggattcacatgcagaatagaccagagcctatgcattggaatggggacaggcccccagctagcccttggctgagtcagcaccacagacagtccactgtaagccccaaactattgcctcttgcatctaaatgctttgccatcatttttttggttttggtttggtcaaatattacatgctgcattctgatcacactcatctccgctgtaccctgtatgcctcccaccctcatcaacgccctctgtcctctatctcctttcccacgttcacgtctttctgtttttttttgtttttgtttttgtttttgtttttttttttttttttttttttttttttttttttttttttttttttttttttttttttttttttttttttttttttttttttttttttttttttttttgtgtgtgtgtgtgtgtgtgtgtgtgtgtgtgtgtgccccccactctgtttagctaggtttgtctgtgtggccacaagtttccaactatccactgaagcctggtggacccacttgtggatacatgactgaagacagtgtctgcccttctggaatctaccagtatccacgagttcagcagggtaggatgaggccctttgagtttctctcccacccatgattgaccgatgataggctcagttttggaagctgctatgcactcatgattgcaatggctgtgttgtccaaacagtagcattcacagtcttttgccctattgtctggctcttaacattctttccactccaacttctgtgacatcacctgagccttggggatttggggaggggagctgatactataactctcctgaacactcaaccatcacgtattgccgtcaccctctgaacccaagaatctctgtattcattgcgaagagaagcttccctgactaaggcctggcatagcatttgtctattattatacaaacacaaatctaaatacatctttttctaaatacagagatttagaaagcagcttgactccatatcactttagttaaacaactgtagtaaggttgcctgtataggctgagacccaagccaaagactttcaaccgagtttatagcatcagatatggaccttctatgaagcaggtctcaaatccagtaggggagtagttggttaccaccataaccttcatgccatgattgaaccagtgggcacgtcttaactggcagatcggtattgtagttcatagggttcacaggtgggtaaaatagttgccatgttaaccccagcaccttgcgtagcacctgccagcaccatgaatgctacccagcagaggagaagtttcaacctcacttctagcttgatttatcgtcatctcttaactgaagttatgtgtggtgtctttcagcaatggtcttgttagctagttctggtgagcagccaatagcaatcggcaagggcttccctgagaacgcctagtgacagatctcacatgtggccttgggtccttagcaacccattacttttagaagcagcattatccagccatttgtatccctttcaatttttttaaaacgttattttttagttgacctacaaagtggtagcttcccatatggtatacacttgtttttggttaattctcatctctcccggccttttatttcttcttgtcccagccctatctctgtttgaacctttccatctcctgtagttcccatttctttcataccacctgtgctcatcttctccttcctcttcccttaagccattccccatgctgatggccccttctagttttctggcctttatagttattctaggttaaacccacaaataagattcacagacaagactcatatgtcagagagaacatgtacctggtatatggtgaaggggaaaatagctagtaaaatacaaaaagttgataaccatacccactgggaatatttcgtctggtgtttcaagtctctcgcccgcacacacacacacctgctaataggtcatttcatgagtctaagacaagacttgagagaccagcaaggccctggaggtcttgtttcataagagcatcctcagggcttctgggcccttgtgacacatgccaggcctttcagggaaccacaagaatggcccagagcaagttctaaaccactatgattcatgggtaggcttttctctcctgagacctgagccatagggtattccccacccatgtagctcaggaccacaagggtcactggctcctcttcatacgcctgagatggttgtgacttatcagaaaaggttagccttgccatgtggcagagtaactctggcccttagtccgtatatgtggtagaggtcatgatgaataggtgtgcaaggtgaacagaggtgtaacccattggtgtccgaggcatctgtgagcctccacttctgaacatccctttgcttgtgcgttccctgggttgagcagacgtcttgagcaataagcccagattttagcatgtgtgtcccttcatgagatgacaagaacacgcagctaaacctcttctgttctttgctgcctacctgctgtgtctattggtgaaaagatgctacacagtagatatcctgctcatccctttccctgtctatggagaaggcatacttttctgggtgtgatagtgcacacctgtcatcccagcccttgggaagctgaggcgagaagatcaagaactcgccagacaaaactggggtatagtgcaaaaccctgtcttgaaacaacaaaaacataattgtacaggttttgaattctaaatgaatactagaccacacacacaccagcatcaaagggaatggagaagattatattggcaaagtgaacctggccaattgacgatattaagtgaatcacggggttcttgctgtgggtaattgatgactttctttctttcttccttccttccttccttccttccttccttccttccttcctttctttctttctttcttttttttttttttttgagacagggtttctctgtattgttttggagactgtcctggaactcactcggtagaccaggctggcttcgaactcacagagatccacctgcctctacctctgcctcctgagtgttgggattaaaggtgtgcaccaccactgcccggccaatcactgactttcctgactgtatgtgttggaatctctctacaagagatctacaatcaatgcagttcgattcaagtgtctctccctcccctataatatcacgttctcagcccttacaccatgcatattcacaactggtaaacttttaaaaaaataataaatgagtcaacctaccctaggattcatagatcattgattgggaaagcaatggcacagggaagataaaaacataaatcccttggtctctttaagttcagctaatggaaactcccttctcccaggggcttccctgaggagcagcagggctcagggtacacacacacacacacacacacacacacacacacacacacacacacacacatatcccagagcactggttgagttctggattagcagacctctcctccctctgaaatgctccagctgggaaggtctctggttctggataaacgacaccccgggaggccttacaggcagagatttaattgtctctcgtgtatttttctagtgcaggtcccccaaaaggaattaggaagtggaggttttcaggtagagtgaaccagcaagtccattattcatctctcctgctcagtgtgtctccatttcctattggtcttagcaggctggaagcacctctggtgacttttctgtgtccccagcaaacatatgaacttcgggtgtgtttcatataagcgagtcctccgccacctagcttccagtgagactaagctccccccaagttttttaaacctagagaagtatgaagaacaatggatccctacccccacctgttataaagtggaggtgggctatgcccccagtgcatcaatccctgaggcaggtgggagagctgtccctgcccctcaccagctgcagcacttgggagagtggcccccacaccatgcccgggaaacacagtagagctggccttgcaggtggaggagtgggagagctaactttgaggacttgaaagcaggacaaatggccccgccccttgctcattgctgcaaggggtgaaccagccagggcaatgctgcagagctcaccctggtggtgaagacagaggagagctggcaggctgaccaaccctgcaaccactcaggtgttggtctaccccaacatgtcttccatctgtgatatgctggagctcaggagttgggggcaggtgtcagtcctgtggacccagggcgcgtagtggcatctccatatcattttagtttctgtttccttggcagcagaaaatgcagagcgtcttttcgtatttactttacttgccatccatgtatcctcagtgaagtatctgctcagatctttcttttgcctggtttttgtctgtttgttttaatttaggcgctcactttttgttcctaaattttgtgttctgttttgttttaattgaggtgttcattgtcttgttcctaattttgtacattaaaaatatttttttgcattcactagtttggtgtgtgtgtgtgtgtgtgagagagagagagagagagagagacagagagagagagagagagacagagagagagacagagacagagagagagagagagagagaagcaggaattgtttctctccttccactatgtgggtttcagggctcaaacttagtcagcaggtttagaggcaagcaactttaccatctttctgaccttttacatttgaaaatgcatttttagtttcaatttagccatacttagaaataagcacaatgatgtgtgtgaatttagggggtacatttttacttttgatacatatatagggtacctagaggggtaactgccatgttgaacctatgaggtgatgagccataaaactagcatggtaggagaacaaaggagataggaggagcctgggtccttgactgaattcttttcttttttctttttttcttttcttccttccttccttccttccttccttccttccttcctttctttctttctttctttctttttttcccagacagggtttctctgtgtaactttggagcctatcctggcactcgctctggagaccaagctagcctccaactcacagaaatgcacctgcttctgcctcccaagtgctggcattaaaggcatgtgccaccaatgcccggccttgacggaattcttgacagaatattccatcatccctgggctcagcccaccttcagatttcttctttggtgaaagaattcctgattttttaagttgcttttaaatttctatgtttcagctgggcagtggtggcacacaccttcaaactcagcgcttgggagggcagaggcaggtggttctctgtgagcttgaggccaggctggtctacatagaatgaattccaggacagccaaagctatatagagaaaccctgtattgaaaaatcaaaacgcagaaaaacaaacaaagctaggccatctcttgcttatagttgaaagtattcctgatacatattcagattatctgcacatctctgtgaccttggataagtctctgagtttctccatgaatcctttgctcctctgtgtaatccttaataaatgtaaattgaacactgaatgagcaccggtgataccattgaactcatgactgtcaatcccattaaatgagtaaatactcccaaagaggttggaatgttgcctgacacccactaagaggctgtggaagagtttaccaaatggaacaaaaagaaaagcagccatggttgtctgctttgttttgtaccttgatgcatcatcgaggcgctgtggtcttaatgtggaacctcgacccccattcatgactgaggctcgcagagcatgaagtgacccccaaactctgtctcaaaacacccacactaatagtttctttttgatgcaacagactccttagagaacgcaggcttgtaaaaaagaaagggctgtgaccaccaagtcaggtcactagatgaccaaaataaccaaactcattcatgcaacccttctggaaggctgtagaagttttgaaacccccttttgaaagggtctttccatctggttgactttttttaacctctcctcctgtctgagatttcttgtcagagatagagagatgggaggggtgttagtgcctggcttctctgccctttccgtgtagtgaaggaacaagccgctggtcatgtgggaaagagctggtgtgacctgggatgtcactttctgttaccccaatggccagcctttagtgaggtcacttgaagttgagcaacagtgaagcattactttaaaatagttcttggtcacagggataaacaatcaactagtaggtgtgtccattaaaagtcttttggaaagggtcttccaagtgtgtgcccttcccacttgcttcttaccctttctgtcaggaacaccccaggaaagggaaccccacctttggatctgtctccttcctacccagccttcctgcttctgtctgaactaccttccttcttcagtagccaggatcctttaaaaatgagcaacaaaaacgtgggcctcatctggtcacaagcatcctctggaatcccatctcacttagaatacaatctgaagatcctctccaaatgaatacagtcatccctgagtgggtggtagctcctcctttctgccactttcctgctggttcacaccactttcctggtcttcttaagtcacagactttaagagtacactctgcctttccatgtagcagtcccctttctagaacattctttcctgcataactgtctgcttctgtcctcactgaattctgacttgtattttaatgtcaacgtccagaagggctttctcttcccacccgctaaaatgtgtccctctctttctttctttctttctttctttctttcttccttccttccttccttccttccttccttcctttctttctttctttctttctttctttctttctttctttctttctttctttctttctttctaagactcatttatttactacttatgtatacagcattctgtctccatgtctgcctcacactagtagagggcaccagatctcctcatagatggctgtgagccacatgtggttgctgggaattgaactcaggtcctctggaagagcagttagtgctcttaaccaatgagccatctctccagccccatccctcttcttccttattgacgtctgtagtaccctaagttactgacctcattacagactaaatttgttagcattgttccattgtcagagtatctacagaagccaggatggtctaccttgggcatttactaggcaatgaagctgaataaaaaccttttgaccaagttctcagctggatgtttcttgtgactctgtgaagctggccctgagactacttcttggaaagttcctgatgctgtcctgaacaaagagaccaaaatgattgtgctgatgatgtgtaggtgatcgaatgaactttgatttgattagaaatctacctcaccacacatagataatctcccttcttctgttcctgggtacctttgggcagccttagtctagacagcattctcatctgtggtggtttatggagaaatcacattgccttttgtgtgtttcattttggaacataggatttctgcctcttcctgaaagcttgcggaggactgttgcatgtagagcctgcctagagttcctggagtacaagtatgagcagctcttgccctagctctgggctcagattagttcccagccagccatggccatcctggctgtttaggccttttgcccttttggatgaccacagtctatgcgacatctgaatacaagggcatgggatacctccagtgagaaccacacctcactgaatttttcccagattcctgaccaaaaacattacacaccttaccaaatgactggtgctttaaaacacaaaagtcgtacaacaataagttctcagttacaaaatgagaaccccactgtaactcctgcactctgggcaagcgggcaaatgattttcagtgttcaggacatcaaatttctcacttctgtgttaggggtgttcacatggatgttgcccttgattggcatgaaaacacattttgtttaaatgcaacatgcttttgcagcagctgctatacttcgtcaaacctagatgtcgtccactgtataactcaccattaatttatgtgtaccaagaaaggaacaaatctttgccgtgaaatgtcagcatgcctctgactgtgtgttatacctcatttgaaaagatacgtctctgaagacttctggtttgacagttgatgagcacaaagctgaactcagatgcaaaagaagaccccaaagacttgagtttgtgataaatggagagctcagagcaaatatgcctttgtatcagagtatctaatctgttgtcccatttgacacagtcacacaggtgtaatactgctctgtggtctggggcagaaagtgatttttctaggccactggcaaatggaaagagtcaaatgacattgcttcatgactgtttagcgccacggtgttctgacattgcttcatggttgttcatcctctgtgagaaggatgaaatcagatgcctaaaccaggttgtgttgatgagctgttgttagcaagaacttgtctgtggccatcagtcaagccccatttccttttgcttcttgtgacactcctgtcttaagacttgaactggcattccttgtgtgatgccaacaagatggcagcagagactccgatcacatctaatgacacaagagacatggtccgaatcctagatgctcagtgcagcacaccacttagtctagctgcaaaggtcagtattatgctgactctcctgcaaaagtttattccagaaccagagacattaagtcgttttcccaagtcacagcgcttaattatgggaatttacttcattggaggacagagctcccacccctaccctcaccccactgaactgtgagcactgaactactgagcatgcttgcaagactaggaggaaaagttcttcagaaactccttcaatccaagtctctcagcatcacagctgtgtgggcagaacaacctgaacaggtctccattcaagatccccttgtgctcaacaatgtaggttttccagcaacatggcagaacaggaagtccttaaggctcggcttagatgggacattccaggtccttgtttctgcacagtgtccattgacaccagctccctgaagtgtcagggcctctggtgctagactggatgtcagcacatccccacgacttacagattgaatgtctgggcaagtttctcttctattctagactacaaaatggaataactctagtatctactctttcccctttgactgtcataatgaagcctttagactgcatgtcagatgctcggtggtattatgtaaaaggcatttgctgagtatcctgtagcctgtggtattcatacagccctctttggtgactcaccaaacagttttacagatgaggaaatgtgcagaagttcttgcccatagccttgtggctaggatatgacaaaacctgcctgttctttgacctctttaaacagacttcagtgtctgtaagctggaggctaaggaggctttttgtctgagtcttctgatgcaggaattttcttctttttaaatttatttatctttatttgatgtgcatttgtattttgcccacaggtctgtgtggtctcagatcttggagttgcagacagttgtgagctgccatgttggtgctggcaattgaaccctggtcctctggaagagcagtcagtgctcttaaccactgagccatctctctagtcccggagttttgttctgcaactccatgcaataactgcatttatttacaaggtagagggcaatgatttgggatctatgttcattgcgtaataatcaactctgggcatcatccatcaactccaacgtcatttctcagtaatgagaacattccaaaccctgtcttcagctatgttgaactacagtggaatgctgtggactgtgatcacccttccgtgtcatagtgtgccaaaacttgtaacttgttcctcttcctaaacaacaggtacatggacactgtggaacactttggccacataaaagatagactcttgccatttgtggcaacatggatgaagctggggatcaaaatgttaaatgaaattagccaacacagaaagacaagctgtctgtgacatcactcacatgcggacccatacacaggaaaatagaggctaccagaggtcggggagggtagagaatagagaaggaagggatgaggttggccaatgggttcaggaatgccatacgttttctatttgttcttatctacgggaaatcttcattcatgcggaaatgatcctgccaccatccttgggtcagtagtctgttgtttatacatttcacatgcctgttcataccgtgtgcctccttttggggattcttaagaatggcaggtccttgtcactacaaattgtcaatttatataatgagccaaacctagatcagattatctgcctgggaaatctggaggaaactctgacgtccaaactcttgtccctttcgtttcccaaaccaaggagtatcttggatgcagtcacatataccttgaacagcttgcagaatctctgggtaaccatgttgctacctatagattctgtctagcatggaagacatgggaaagtcatccttcctagccatcggtactcaaagatgctccctagcatgaaagacggaaagccagccttcgtggccatcactttggtagttggagctacattcaggtgagcagcatgagactcagcatcacatcaagcctcattctgtactggagcgagctgtcaaagttgatgctcttcacgtaccatggagagtagagtggtactccactatgacaggttttcctggtatgaacctggtaaaaacctgggaggctaacccggtgcctccaactgacagcgggtgacctagtcaagactttagccacgagggccaccgtcatgactgccgtgcaaaggcatgtcagggcagggacagaaggtgggttacccacattaaaggtctacttagtggcaggcaccaatcaggattctccacttacaaataactgggaatcgtatgagttgtttttcatcagtctgagaaattcttaagagaactgcattcaaggtgaagaaacatatttgggctatggcttcgcaggtttcagtccacaggtggctggctctgttgtcatggtctgggatagcagtggaacttcacagtatgcggtaggatgaattgcttacccccactatgcccaggaaatagaaaggcgatgtctctgataactgacttcttcccctttgtggtccatcggggctcccagctcatgggatgatgcctttccagttcagggctgggcttcccctctgaatcaatggcctctagaaatagcctcacaaacaaatgcagtggggtgccttattaaacttcctaggtatcttaacccaatcaagttaggatcaagatgagtcctctggggatgttctgtatacatcccatcagtgacttcttatgtatttccacagagtgtgtaagaagccgtgcttgatttggctctttgagagtttctgaaggagcactcaatagctctgcttgtggttcaccatactggatgtggcatgcgcacttgaaagaatctttgcaatttggggtggagtgttccataaatatccatcatgagagtctgggtactgcactaagggagatttgctggtgacggaaagcttttgtgttcttttatcgctgtgatactcagataaacccacactaggatgcaggatttgttctctctctctctctctctctctctctctctctctctctctctctctctctctctctctgggtatgagtttgggtatatcatcagtttcttagaatgtcatctcccactgtttgcccacaggaggagagaagggcaacatccaagtaggtgaaaagtcacgaagagaaggcagactgtgccaacgtgtcctccacgtgacccaaaaaagaagaaaatgccaggcactctaaacagagagctgaagccccagagaaaacagctagatacttgcccaagaaatattcgcccacagaaatgagggaagatgccatggtacgaccctgtctcttccccgaatgcgttcacgtggcatttatccaaggcctgctgtcttacttctatggatgctgtcccagagagccacgaactggtagctcacacacgatgggaattcatttctcacaattctaattgtgatcaatgcacggtcttctgaaaaacattgtctcttttgtagatgaacatctaaattattctgccctcagtcctgtggcagaagacttaaggagtgtcttttgtaaaaatacatgtcacaagggcttcaacttcatgttctaattacttatgaaggtctgaatgagaaatgccacaaccaccccctggctcccaagtttgcataagggagtatagacagtttaatgctcaattgtgcagaataatatgaaaaaaaatcagaagggttagttaagatgctggaacagcaggggaaaccaggggctgagaatctatacctatgagacctggaagggattgctacgcttccaactttgaagaaattttgaaccttcaccaaactgaaagcactgcccagggatagggtggttcttcccagtagccaagcgggaatcgttaggtcctatttagattcatcccataatctgagaggcatccttgtaagcttgagatcacaggcaagttacacaggacctagaggcaattacgggatgcttttcagggctgaacagttgcatccccattcacaatgtcagactagggcctggggtccccactttaccaatgagatgcagaccctgaacatcacactcattcaaggtctctctttgtgtatgtttattgtgccacgcccaacaacccaaacatgtgtgacagtcacagaagctgcctagatcagtgggtctcagcctgtgggtctcgaaccctttgagggtcaaacaaccctttctcaggggcttgcttgtcagagatcctgcaaattagatacttacattgccattcataagaatagaacatttacagttatgaagtagcaatgaaaataattttatggttggcggccacaacatgaggaagttcttacgtagttaagggtcacagcattacgatggttgagaaccactggcctagactaaagcttttgtttcactcttaagtagctcaaggatcccacgtatgctccaaatcccgatttctcccttgtaaaatggaaattttatcacttaccatatataatgtgactgtatatgtctgttggtgtggtgaggcatctcagtacatgccaataacatgcatccatcagagtcaggctaactggtttcaaatcatctccaaaaccatctgtttgttcttgggaacagttaaaacctggcgatttttggtcatgtgttggtcctcctacttatcctcttttgctgcagaacactgaaagtttcccctgtctacccacgtcaagagctttctgagggttaaagagatgcatacaaacccccgagtacatttgcccgacacattaatacaccgtgcatgttggctaccgagattattattagcccggcaggacagggaggagtattggggggtccctggggtgtgttcactgctgtttactctttggccggtgcttgactggccagggatcatgagtttgtttttctggtacggagcttgccctggtgttctggagtgaccccacagggctgactgagctcattatacaaagccgtgtgctgggtcctgtccagctccatccagccccaccccctttgcctgctaagcctgtgtgcccatgatcctcaggactgtcactggctagcgttgttttcacacttattctgaaccggatccaaatcacctgacaaaggcgttcctccctgacacaccttttctccctcttctgaggaggccagagggcttcagatcctccgaggcaattgtttggccctccccatgctctctttcctacaaactctgctttctggtgtgcttttccaacatgagtcagacatgaaagggcatgagggtgttgaggaagagagttggtgttagccagccagacttcaccctcgctgtgctctccatagggagagcaagaggagccttggacacgggtcgtacttaaggtttctaatcagggtcacacctacaacgtgctgattatagggtaacatatgttacagcacacatcatgactgcgctgtttgctttctgtcaacttgatattaaccaagacacccgggaagaaggaatctcagtttgcaattgcctctacctggttggcatgtaggcctgtctgtgagggggaaggctagcctactgtgggtggtgcagctctgaggaggtggtcctggcttgtataagaaggaagttaaatatgagcccggtagcaagtcaggaagcaggttcctgcatggtccctatctctgctactgatttccttcaataaaggactgtgatccaaacatgtaagctaaaacaacaacaacaacccaaaacaaaaaccaaaaacacctctttcttccctgtccctgttggtcatggtgtttattacagaaatagaaaaaagaaagaaagaaagaaagaaagaaagaaaacccttcgacaatgacaagtaaaaggccactgtgccattgtgaggattcagtatccttagttacccacagaaaaagcttagcatggcacctggaatgttgcaggcttccagcacgtgctacctgttgtcatgtgcagggagccttagtgtcctctttagctgctccgttttcacacagtctagacaacgtggggcatcatgtccaaagcccttcttgctcggtagtaactccgttgagtagttataaaggtgatgtctaacccacaaccccacaacatgtcctgctggccatggcttacagcagggcacggaaacaggagtgtgtctgcccgctgtgtggtgcagtgcatgtaaagctcctagagcccccacccccagcactcttctcttctctgctgtttgcctatcagaattccctttcacaaggtcgagccacctaaaaacatacagaggccaagccttcaagcagggctatgtccataagctttgtatctgcagaggagttggctcacaggatttgcagaccttcctgtcccttggctgtctgtgtcattcatacaagagacaggctttctctgggcttctctcaggttggaggtgtcctctacctctttgttgatgggcaaagcatggacccaggcggctcaagaaaaaacctgcaataaaagacgactttctctggctggcggtaagacattgtaattgagggtcttggtttggctccgagaaatggcctggatctcagaaatagctaagatctcaagctttcggtcttcactggaactctgcctctattctcgtgagccctggcatgtttcctataccagcatcgttgtttgtcatctgaagagtgtggatgatgcttctcctggtgagaggagtgactcaaatccctgcttccgttcaaacagttgaaccccagagcctagaacagggtcttcatgaatggtggcgactgactggcaaacacttgctttggaagaaatgctaaagtctgtgcaattcctggcacaggtgtcttgaatagttgcccgtgcctgttctaaaccagaatctgaccaattttctccacctgtggtcgccattaaagttttattggaacatggctatggccatcttttatatgaagttgttgggcagctttgcacctgtactgggagagtttaatagttatgggtgagacgtggccacaaagcctcaaacagactgttgggcacaaaactcgggctcttgttccgaatatcaagatcaccttgcctgaaagtggtagtggattttgttttcccattttgcagggaaatttcccatttagggaaattataaatcagaaaccagcagtgagctggccaccttgaggtacgtacactttacatcttctcctcaatatttagagattttgcctctactttgttttgcctctttagttctactctgaacacaccaatttctgtgcccccggctctccagtgtaaggtgttactttcatttctttgtaaaaagaaaccaaacccacctgctagctggcctttcctttagggacagaccctatgtcccacaagagttttagggtcacgaaaccacactggacatatcgccttcagtataggctactttgtcgattgaaagactggggtgctggcaggcccaggacagagcccaagagaagataaagagtgtgtatcttaccattctttcctagcattccaaatggcatgaccttagtcttcttggattcaattaaccaatatgtaagatggtcacagtgatgcctgtaaacctggttgtcatggagacatgaggtgtctattgtccaaatcacaatagagttgttaaatatacctataatcttgactactatttgggtatgagatgtataaaaatctctgctatgtgctgtcactttttcgaagtttgagtgtgttgagtgggaccttgtattctggccttgtgagggacagctccccaggcatctatgcgtctacaaagtacactgaggtctagaactgaaatcctggtgccagctgagcagtcatatgggtcccagtctgggagcacagtatggctatcagaaattttctttctttgcatctagaacaaaaccacaggctctcaatttccccggccccaagcacaggaccacacagggatatctatagcctgaggaatccattgagaagcggatatctgagacttagtttgtggtgagtggttactgtctagaaaagaacacctttgctgttgtcctcttataggaatgcaggggagagagaaagggagtcagatctccagtttgcatgcagctagaatgctgagatgaaagtgactcactcagggccacccagcgaagagcagcttggctgtcctcccaggctccatccctctggtcatccaaatatggaagcacatggtgacacagagacacatgcttctcctgggtcttctgaggtagaatgcttccaaggacacttcggaatgaagggagtagagtcttagaggcctctgtcagggcccgctgggagaagcctctcaaggaccctggtggaatctcaaagttctctctctgaaaggactaggatcttggaatactgcccagaacatggcagcagaaatatcctcccaactgcaggtatcaccttattccaggcattcctcctctggaagccttcttcacccgttggcggcccctttgacagccatcttgagactagcctggaaacttaattcaggtgtctctc

SEQ ID NO: 47 - DNA, 34468 bp, Cricetulus griseus
  >scaffold_391 dna:scaffold scaffold:CHOK1GS_HDv1:scaffold_391:3899:38366:1
  misc_feature 1843..1942: /note="n is unknown"
  misc_feature 3946..4045: /note="n is unknown"
  misc_feature 6303..6402: /note="n is unknown"
  misc_feature 12072..12171: /note="n is unknown"
  misc_feature 14590..14689: /note="n is unknwon"
  misc_feature 19937..20036: /note="n is unknown"
  misc_feature 26194..26293: /note="n is unknown"
  misc_feature 32338..32437: /note="n is unknown"
  misc_feature 34467..34468: /note="n is unknown"
ctgacagagagagagagacgtgactgacagagagagagagagacgtgactgacagagagagagagagacgtgactgacagagagagagagacgtgactgaaagagagaatttgattgacgggaaaaaatcgacaggaaaaatcgacaggcggatagtgattgacaggccccgcccctcccacaccctcagtaccttgagcatcattaattcactgatctctgtttctccgatgaatttaacggacgggcagcaaaccggaagtcccgcccacagcgctcaacggaagctgtttgtttttctatttttttcctcccactcgggacccgagacgcggacgccgcggacacgcgaggaccccggagccgtatccggtgccgctccccggaagtccctcccttcagccctgccgccccggtccccgcaccgactgtttccgggtccccatcgcgagcggaaccttgttgctgcgcagcggtgtcgcggggacggacgggaagcgcaggtctccgaccggaagtcgcgttggcagcggaaccgcggttccggccccgctgccctccgggagacggacccggtaacgcaccggaagccgggagcagcgcgtttcacacgcgggattcgcggcggtgcaagcggagcctgtgcggagtcggaaccggaagccctgtggccgtagcgctgctggtgctggtctgagttcggaccggaagtcgcttgtgttggcaaacgaagccgaacggaagtcgggaatcccgggactcacaagccgagttcccgtcgctgaaaagcggtcgttcttcccgcggagtctgaaaagaaaactctgacaggaagtcgctattgctggcaagggagaccaaccggaagtcgggcgtgctggacccaaaggctgaatccccgacactggaagccggccggtcaccgggacaggaagtcgctagtgctggccgccgaacccatccggaagttgggcatcccgtgactcacaaaccgaattctcgtcaccagcggattctcatttgcagtggcggagccgcttttcggtaaccggaagtcgctggtacgggcgtggtgaagccgaccggaagactggaatgctgggaatgagcagccgaattccagtcactgcataccaggagcagcttttgcaccgagccagtcttcaccggaaccgggttgcgctgtcgtcctgaattcaaacggaagtcgggcgttcttagattgcagcaaaagtccggtcgctggaagccagccgcgcgccgttcccatctattagaaggactccggacgtcgtcagtgctggcaaggcgaagccaacaggaagtcgggaatcgtgagtctcagaagccccattccggtgtccgcaggggaagccagaacgggaccggaactccgtagggctggcgacctgaagccaagcggaagtagggcgcactggaacttggaagagaaattcccgtctccgtttccccgccatcgccggtacggaatcggtcagccgagaccggaagtctgtagtgctggcgtgctgaagccatccggaagtcgggcgtgaagatcctccagcggggcgctgtcgtcacacagcgagggcggcaccgcgtcccaggacagcgttctgcagaccggaagcggaagcgcgtcatagagccgagtccgtctgtcggtcggcggcgtcggggacgcgggcgccgctttctgagctcgatcccggcggcggcggcggcggcggcggagtccgcggtggtgagcgcgggcccgggagaccccgtgcgggcggaagtggcgtgtggcggagggcgtgtcctgcggtgattgacgtgtggctgggaagtgagtgannnnnnnnnnnnnnnnnnnnnnnnnnnnnnnnnnnnnnnnnnnnnnnnnnnnnnnnnnnnnnnnnnnnnnnnnnnnnnnnnnnnnnnnnnnnnnnnnnnnctgacaacgtccctcttcctctgaccacgcccctcactccgctcctgaccccgcccctcccactgaccccgcctctctcaccgaccccgcccctaggaggcaccggcgccctggccgccgccctcgcccgtctctaccccggcagcagcgtcaccgtgtttgagaccccggaggtcgcggccgccgcccagcagcacttccgggtcccggggccggagccgagcgtccgcttcgtgggaggtgcgggcttccgggggcgggacctgggggtggttcccgcatgtcaatcatcctcagcaccgcccattagtcatttaatgtccaatcctgccctcccgtcaaactgtagccccgcccacttgtcaatcacacttaggctgcccggacctctcaatcattgagaaaagccccgcccatttgagtctttagccccgccctcaggtccatcagttgtggcccgcccacctgtccgtcattcactcagaatccccgctcacccgccacactttctctccggcccctgacgtcactaactgtcccggccccgcccccaggagacttcttccggtcgcccctcccccctgccgacctttacgtcctggcgcgggttctgcacgactgggacgacgcggcctgcgcggagctgctggggagggcggggcgcggtgaggagggcggggcttcgggatgatggacaggggcctcgggaggaggggcgggatgcagtgaggagggcggggcctcaggaggaggggcggggtctcggggagggagggacggggcctcgagaggagggcggggcccatctctatgaccccgccccctgctctctgacgtcactccgatcccgcaggctccgccctgctcctggtcgaggccgtgctctcccccggggggcggggcccgctgcccgcgctgctgacgtcactcaccatgctcgcccaggccgctgggcgcgagcgggaggaggcggagttccgggcgctgacggcggccgcggggtttcccgacctcaccctgcgccgcccagggggtccgttcgccgtcatgctcgcccggaagtgacgtcagcgaggatgacgtcagcgcgctctccagggtgcggggccgggaataaaccttatgtttgcacctgagctgtcaatcatttccgcagccccgccccatgctgacaatgtcagtcagcgccgcgggcaggacttcctgcctgggttgtgtcagtcaatctaccgtcacccaggcggagggcgggacttcctgcccccggccccgccccccgcaaaccccacacagtggattcagatctcagtctctttattgatcattggaggcggggccgggaaatgggcggtgcctccgtgacgtcacggccacagccttcagtcatgactcggggcggggcctccgttcctgtgacgtcctcgccgacctcccggccccgccccgtcttcactcctgggcgtggccgagttgtcgttgggcggggcctcccggaatcactgccctgggtgacgtcactcctccccggccacgcccacggcgcgctcggccgccgcccacagccggtcctgcagcgcggggtctcccgagaggccgagcggcgccgcgggggcctcgtccacgaagtagacgccgccctggttctccagctcgggggcggcggccacgaagaccggggtccaggcgccctcggcgggggtctgcggggcggggccggggcgggggcggggcgggggtggggtcagagtcggagagagagagagtcagagagagagtgctccccacagtgctcttcacagtgctcctcactcagtgctcagtgctcctcactcagtactccccgaacagtgctcctcactcagtgctcctcactcagtgctcagtgctcctcacttactgctcctcactgtgctcctcactcagtgctcctcactcagtgctcagtgctcctcactcagtgctccccgaacagtgctccccacacagtgctcctcactcagtgcnnnnnnnnnnnnnnnnnnnnnnnnnnnnnnnnnnnnnnnnnnnnnnnnnnnnnnnnnnnnnnnnnnnnnnnnnnnnnnnnnnnnnnnnnnnnnnnnnnnncacctgtcaatcatctcccggtcctgtgatactgtggacgtgactcacgccccaggggttcccccgacgtcatcgatgacgtcatccctgaccccaatacacccgtcacggggtttcccggtcctggagccccggcggtgacgtcagctgggatgcggattaaaccggatcagagggatccccgggtgaggccccgccctctgtgaggtcacccgcccgtcagtcagcggggggtggggtcgctgagacactgagaccggaggatccacaggccccgcccccggccctgatccggctcagccgggatttcccggattagccccgccctcgccccggaggccccgccccctgagcgcatttaaagctgggccggggccggggccggggcgtcggctgctgcggggtctccatggccggggagaagggcgacggggcggagcctctggagcaggacttccggttgctgacggagctggcgcagggcttcatggtctcccaggtgggggcggggccgcgagggacaggggcggggacactgggggaggggcggggcctcgggggagaggggcggggccgggacacactgtgagcttgtccagacccctccctgagccccgccccgtgctgacggccccgccccctccttccggacacgccccgtgctgacgaccccgtcctgacggccccgccccccaggtgctgttcaccgcctgcgagctgggcgtgttcgacgccctggaccccgccccccggggcgcggcgtgggtgtggcgggcgctgcggctgagtccgcgggggacgcggctgctgctcgacgcctgcgccgccctcgggctgctgcgcgtggaggacgacggcgccgacggtgacgtcaggggcggggcggggcctccgggagacaggggcggggacgtcaggagcggggcggggtcagagggaggcaggcggggcaggaacgtcagagacgcccgggtgacatcatggagggcggggcctgagcactctgaggagctgaggtcgtggtgggcgtgtcctgggtcctgaatgattgacaggcggtgacttcattgggtgggcggggcccgggactcctgcctcgctgaccccactgaccccacccgctgtgtcggccccgcccaggcgtctacgccctgacgcgcgtgtcccgcgagctgctctccgcccggagccccctcgcccagcgctcgatgctgcgatacctgggcgggaccacgcgggccgtgtgggcggagctgggcggggccgtcaggtcaggaggggcggggccgtcaggtcaggaggggcagggccgtcaggtcaggaggggcggggccgtcaggtcaggaggggcggggccgtcaggtcaggaggggcggggccgtcaggtcaggaggggcggggccgtcaggtgatgggcgtggtcaggctgaggactgagcaaggctgaggggcggagagggggcgggtcccaggagggggacacatgagggggcgtgataatgctttgaggggcgtggtcagacccagccccgccccacccgcccacagggacggccggaaccagaaccccgaggcgctgggcgtggccacacgggagccgttcgccgccatctacaggtgagggggcggggccggctgagactccgcccctgggagagtgactgtggccccgccccgtgctgaggccccgcccccgggtgtgctgaccccgccctgctgctggttgtcaccccctcgggttattttctggcccctgggttattgttttacccccggggttatttttttacccccagggttatttattgcccccggggttatgtattaatcctggggttattttctgcccccggtttatttttttgtccctggggttatattttgcccccaggtcagagcccgagcgcctcctgttcatgtcggggctgcaggagacgtggagcgtgtgggcggggccggtgctcacgaccttcgacctctcggagttcagggtcgtctgcgacgtcggaggtcggcaactccctcccgccccgcccatgagtgacgggccccgcccctcaccctcaacctgcccccactccacaacctgtcactcactctgaaccggaccctctcactgaccccgcccctctcactggccccgcccctctcactgaccccgcccctctcaatgaccccgaccctctcactgaccccgcccctctcaccctcacactactccgcccctctcactgaccccgcccctctcactgaccccnnnnnnnnnnnnnnnnnnnnnnnnnnnnnnnnnnnnnnnnnnnnnnnnnnnnnnnnnnnnnnnnnnnnnnnnnnnnnnnnnnnnnnnnnnnnnnnnnnnngagagacagagagacagagagacagagagagaaacagaagaacagagaaacaggaacagagagatagagagagagacaggaacagagagagagacagaggaacagagagatggagagagagacaggaacagagagagagacagaggaacagagagacagagagacagaggaacagagagacagcgacgagagagagagcgcgagagcgtaaatgggcagggcccatctttaaaggggtcctctgcacctgcctgcagacttagttcccatggaaccctgggctgaccagggttctgcctgagtggattcctgcaggtcacgggggccaggccagtcaatgcctgaacctttcaggtggcgcccgccgcccggctggttcgagagctgctgccgactgtgcgaggttcatttattgtagtttaacaagctgaccccgcgtcagcgcgcatctctcacgcgcgtggttagagacggactctttggtccctgggggcggcgcgggggtggggtggggtcgtttatgatgaagaaattcacgttccattcacagagtcgcgtgttgtggccgcgtggagcccaggtgggggaatcgacaggcggggcttccggttccacagtgacgtcatctgcggcgtcgccgcggtgccctcgctgcaaacggccctagctgtggggtgggaggggaattctgcctcgggccttcggcggggagggggcggcgcccaggcccgtttgcccccggcccgttctccctctcgcactgcggcctcttccgaggaactgcaatgcgcagactgcactgcaaataagcagcaggttccctgcctttgccagcaccggaagcgcctctcccgccatgactgttgagggcattttcctcttccgggaaccataagctgctttgccgcggtttccaggacccccggagggcggggagaactccgcgcgtttccggggatgccgttaccttcatcggggtctccggacgcccccaaactgtcccccgacgcccgggaacccggctttcccagcatcctgagctccgccccccggcgacggagtctgccagcaccggaagcgctgactccgccatgtttgttaggggcaagccaccttctgtgccccccccctcactcgcggagtccccggtcgtcggggttttggcaacggaggtggcctcggcctccgccggtggcgttcagccctccgcgtttgtccgtggtccgtgcggtccgggtgcggtgaggacactggagcgcccgacatctttcccggccaggactcggtttcccgtgatgcttcgctcccttttctgggggggaccctctgtcctcacgggacccggggcggccgccatatcctgcggtggcgctcatcctcatgggaaatgtagtccccacgggaagctgtggaaaaatgcaatgtttgcagtggatgcggacgaaagtccatagttctgggcttgtgccgggtcgcagagcctcatgggagatgtagtcaccccgggaagtgttataacgccgtctgtttgacaccagcgatagcgctgtgcatcatgggagatgtagtccccacggaaggctcccgctaccccaagtgtcctttgttttcacaggaaacgttcatacccccttcctttcaggccccagcggcgtcgcagtgcatcgtgggatttgtagtccccgcggagacaccgcggggtgggggtggcgatctgggaacctggccgtcccatgtgttgagcgtgacttctctgtcttggcgttaaccgtgtgatgcgtcaattgactaaatgatcggtgacagcgctgcgctccctctgggatttttttgttttttgttttttttaatggagttttctgggtgtcgctgcagtttcgttcaaatcactgcggagcctggaaacgctgttgctgctgttgacgtagaacatcggtctttttatataaatataaatatgaatataaacataaatacaaatagaaatatacataaatacatataaatataacacaaatataattaatatgaatatacacacataataaaatatgaatatacttatgtaaatacaaataaataaaataaatgtaaatatacataaatataaataagtataaatatgtataattacacgtcataaatatataaatataaatatatagaagtaagcataaatataaatataaacgtaaatataaatataattaaatataactataaatatacataaacatctataaatatatatgaatataaatatcaacataaatatcaatatagatatcaatatgaatttaaatataaattcgaatatatgcacacatatataatttggatttttggaaaccttagctgtgctgtcacctttgagaaacgcgtccctgttaccacgttgaatttttgccgtgtggaaatcaacagccgtattggcctagaaacattgaacttgagtttctcccgtgtgtacacggctaacgcactggattaaatacgcaaggccttatccacgtgggtttgattcaaaaactaataaagttttctctaaataaaaactaaagaggtgagcggtgtaacgggaatctcagcctcggtgctgacggaggcgctaagccgaaggagattaacgctcgtttttggtttgcgacacccgggtcatttttattacaacatcaatcaggacactgagtaaatttcgcgacgccgtctccgatgtcgctggagtgacgcgagcagttagcggtggggacactcctcacgtcgtcagtcacgggcagacactacgtagaaattacggcagagtgagtttccgttctgagtccgcgagctgcgtggtgtggcgtcgacgcctctgcagccttcgcctatttgatcattagagggcgcggtggttgttcattgtcactattatcattattattattattattattattattattattattattacgattatcattatcatgattattatcagtattattattgctattaccgttattattgcggtgtgagatgataaaggcggcgaggacgcttcccagggctgagcgtttacgtcttttgaggttgtaaatgggggaggttttaaaaggcctcacttcctgccctcacttcctgtcctcccttcccgtcctcactccccgtccctctcttccctgtccctcacttccctgtccctcacttccctgtccctcactccccgtccctctcttcccgccctctcttcctgccctctcttcccgtcctcacttcccgtcctcacttccctgtccctcacttcccatctctcacttccctgtccctcacttcccgtctctcacttcccatcctctcttcctgtcctctcttcccgccctcacttcctgtccctcacttccctgtccctctcttcccatctctcacttcccttctctcacttcctgtcctcacttccctgtccctcacttcccttctttcacttcctgtccctcacttcccgtcctcgcttcctgtcctcacttcccgtctctcacttcccgtcctcacttccgccccacttcctgtccgcagtgctcccccggcagccgggccgcgtggccatcgtcacgggcggcaccgcgggcatcggcctggagacggcgcggcagctggcggccctggacttccgggtggtcatcggtgaggcgggggcggcagggcgggcagggcgggggcggggcctggcctggggaggggctcacttccgcccacagtgggtggatttccgagttcccagtgtgacaccgccgtgggtcgatttttcctgttccagccggaaatgacgaggcgacagcgcaggaagtggtgacgcggatccaggcagagacacagaacgagaagggtgagcggggcggggccggggcggggccggtggtgtaggaggcagtgggtgggaaggggcggggctggtgagaggggcggggctgcgctgagtgccacccgctgacgtcactatccgccccgcccccgcagtgcacttcctgttctgtgacctcgcctccctggcctccgtcaggaagttcgccagcgacttcctgtccctggggttcccgctgcacgtgctcgtgaacaacggtgaggggcggggccgagccgggggtgggcaggccgtgggggcggggtgggtcgggccacagctgcgtatgcaaatgagaccccgggtcagagactgagatgcaaatgaggccatgaatattcagcgacccaaccctcgatatgcaaatgagcctcgccttgcagtccctggggctgggccgggctgatttgcatattcgagtggacatttgcatattcatggccccgtttgcgcctctgcatcaccggggctcaaagggggaggggcatgcaaatgaggcgctcagacaaggagctgcaggctccacccaccgcctcatttgcatgttcatggactcattttgcatgtctcacggcgtgggcgtggcttcaccgggacacaccacaaagacaaaccggcagttcatttgcatatgcaaatgagggtcctcactcattccgtccccgccccctggcctgcccttcagtgacctcaccccgcccactgcatcctaaaaccctcccctcaccccggccccgcccctcacgccggccccgccctctccccgcagcgggcgtgatgctggccccgccccacccgacccccgacggcttcgagccgcacctgggcgtgaacttcctgtcccacttcctgctgacgaggctgctgctgggggccctgtgcgcggcggggtcacggggtcggaggtcgcgtgtcgtcaccgtggcgtcggccacgcactacgtggggcgactggacgtggacgcgctgcgcgccaggtgggcggggccgcaggaaggcggggcccgggggcggggcctgtgcagattcagatccgtgaactacgggcgggggcggggctgagctagaggtgggcggagtcagcaggaaattggcgggacacacccggaagtgggcgtggctggcagaagtgggccagggaaaagcggaagtggccctgggagggctcagggggcgtggcctctggggtcctcaggagtgggcgggggcaggggctgagggggcgtggcctgagctgcaaggcgtgtggcctgatcagaaacacggaagtgggcggggctggctgaagcgggtgtgacgggactgaccccgcccccgccccgccccgcagccccgcccactccgcgcacgcggcctacgcggcgagcaagctggcgctcgtgctgttcgccaggcggctgcagcggctgctggcggcgtcgggcgaccccgtgacctccaacatggccgacccgggcgtggtcgccaccgccctgtaccgtggggcctggtggggactgagggcggcgaagagcgcgctgggcggggccctgttcaaggtgaggagcactgcggggagcactgcggggagcactgagtgaggagcactgagtgaggagcactgagtgaggagcactgagtgaggagcactgagtgaggagcactgagtgaggagcactgagcactgagtgaggagcacagtgaggagcactgagtgaggagcactaagtgaggagcactgagtgaggagcactgtgtggggagcactgttcggggagcactgagtgaggagcactgagcactgagtgagnnnnnnnnnnnnnnnnnnnnnnnnnnnnnnnnnnnnnnnnnnnnnnnnnnnnnnnnnnnnnnnnnnnnnnnnnnnnnnnnnnnnnnnnnnnnnnnnnnnnccgctcatctggggctgacgtcactgacgcccccctatggtcctctggagctgacgtcactgacgccccccttggtcctctggggctgaggtcactgacgccccccacattccctctggggctgacgtcactgacgccccatccccaccccccgacccgccacccggggactaagtttgggaggcagtgaaggcacattgcccctaacatacatggcggaggcggcgcttccggtgctggcaaacgacgtcgccgcggggcggagcacagcatgcagggaaagcccggttcgccagcgtggagagacacttaggggacgtccggagacccggataaagggaacgagatccctggaaaccctccgaggtctccccgcacgcaggaggccctggaaaccacagcaaaatcgcttacggtccccggaaggcaaaatgccctcaagcggcatggcgggagaagcgcttccggtgctggcaaactgcattgcggcaaagagggcgcagcgtgggcggaatcccgaggttacggggctcaccggaagttaatgagacatcccgggaactcccccaaagttatcgggagcccagggaacgcgcggaacggtccccggctccggagcagctccgaaaacatcacaaacggggcttccggttccaggatcgcaaagctccatcaacaaagatggaggaaagcgaacttcctgtactggcaaattggtgtgcaggacgcacgggggctgctgtcggggagaccccgactttgcgccgcttctgcaaaaaacgatcacacatccggggactccccgaaggaaacggacgacccagacacccccggaatcgtcccgggccccggatcgcctctacggcagccgcttccgtttgccaggccccaatgttccaacaagaaagatggcggaagcggcatttcctgtactggcaaattccgctgcgggaaatgcgggcgctgcttgcggggaggcccgggtttaaaggctccgggagttgatctgagacatccggggacgctgcagaaaccaacgggagcccccgaaaaccccagaaatctccggggcccggaaaaggctttccaaactgtagcgcaggtgcttccgttatgcacaatgcagggttccctcgataaacatggcggaaacggaacttccggtgctggcaaatcccattgctcatagggggagcggggcatgctgggaaattccctatcgtatccgcgtcagacagatctgggggacaccagggggtcccgggaatgcacagggcgtcccagaaacgcccaaaccacaaccgagctccgggcggctttaaaatccgcagcggaacagcttaaagttcccgaaaggaacgacgccctcaataaaaatggcggagggagcacttccggtactggcaaatcgcactgcggtttaacagcgcgcagcatgcggataaaccgcattttttcgcctgtgcggatgtttgcgggacatccggggatcccagtgaagggacagggcggccggaaaagaccagagtacacccgggccacgagggggaaaagagaaaccgcaaaagaggcacttccggatgccttccctaatgaaaaatggcggaagagggacttccggtcactttgcaaaacgttttccaccccatggaccccgatcgggggcgcgaaacgctactgcgcaaaccgggtcccccgcgccgcccctgcgcgccccacgtgactcacccggcggccggaagcccccgcgcaggcgccgcagcagctgccggaagaggacggcggcgcccacggcgtaggccaggagcgtggcgcgcagggcgccgagcagggacatggcggggccacgcccacttccgggaacgcccaggagacgccccagggagcagggacacgcccgcgggggattccgggacaccggaagtgctgatgtcaatcaaagccgcaacgctgcccacagggtgatccactgataaaaaccccgcccccagtaaacgtcaatcatgtatagctccaccctcaggtaaactgtcagccacaggtgtcagccccacactctggaaatgtcaattaaacatgaagccacgcccactgggaaagcccattagtctgaccacgccctcaggaaacgtcaaaagggattagccccgcccaatgtgaaattgagggacctaaaccacgcccacaagaaatgtcactcaaagcgaaaactccgcccaattgcagaggatcttgatataaaccccacccacaagaaacgtcaatcatggacaaacccggcccatagtaaagagtttgaatgtcaccacgcccaaacgtaacgtcaatcaacccagaagctccgcccacagagagacccatcagtcatcatcacagaccccgccctcacagtcaccatcacagaccccgccctcacagnnnnnnnnnnnnnnnnnnnnnnnnnnnnnnnnnnnnnnnnnnnnnnnnnnnnnnnnnnnnnnnnnnnnnnnnnnnnnnnnnnnnnnnnnnnnnnnnnnnnacccagcacccagcacccaggacccagcacccagcacccaggacccagcacccaggacccaggaccccgtcctgaccccctagccccccctgaccccatcctgaccccgcggtgacccccctgatccccccctgaccccgcggtgaccccagctgaccccccctcacctggttcgtccagcgcgtccgccaggtcgaagtcgcctccgtctcctggggcggggtcaccgtcagtcacccgtcagtcacccgtcaatcacccggccccgcccaccgcggccgccccgagccgggagaaccggttcccaaaccggctgcagccgccccgggcggggagggcggggccagagccgagagccgaccccgcccctgccccagtttctgtcccgggccaggggactcagcgcccagcacccgggggactcagcactcagcacccggggactcagcgtccagcacccagggactcagcactcagtacccgggggactcagagcccagcacccgggagggtgtccaaggggagcaccgagcactgatcacaccgggaggactgagcaccggaagtcaggacgcgggagaccctgcagtgcagagggcgactcagcacccagcaccccagaggccccggggaccccgcagcaggaggactgagctaccagcacccgggggagacacagccacaatcccggcacccacgggagggagtcagggtaccgagcagcgagcacccggggaggactgagcaccgagcacctgggggacttagcacccagcacccggctcccgggccgcagactgagctcgcagcacccgggacaggcgcgggtggggggcggcgggacgaggactgagcacagcacccaggaggggcggagcactgagcaccgagcagccacggaaaccccgcagtcgggggaggactcagcattcagcactcagcaccagcacccggggcagagactaagctcccagcacccgggacccgaccccggccaccccgcaggactccgccccggccgagagcaccgagcacccagcacccggaggactcagcacccagcacccggggcgccgccgccgccgtcaatctcccgggccgggtgctgggtgctcggtgcccccggtgctgtgctgagtcccggccacgccccggccccgccccgtccccgccccgctcaccccgcgcccggagcccccagagcagcagcagcagcagcgccgcgcgcagggcggggccgcccggggtctccatgtcccacgcgcaggggccgcgtccgtctccgccgcgtccgtcccgggagtgcggggtgggcggggccgctccccagatgccccgcgcggggcgggtgctgagcgcacggtgctccgaccggttgggcaggtgggggggggcggggccgccgcggggcgacctgggagccgggccaggggtgacgtcacctctcaggggggacacggggtgacgtcaccactcaggggaggggcgcgggacacgggtgacgtcaccgctcagcgtcaggggcgggggacacggggtgacgtcagggtaaacaggggtttccggggggcggggccggggaacaggaagccccgcccccacccacttctccccttggaccccagggtgatgtcatcgctcgcaaacatgaagccccgcccccccgtgctgcatcattgacatggccccgcccactgcacatgagtgacaggacagggctggaccccggagtccccgacagactcagcttcccccactatccgctacaggccccgcccccttcactgtcaatcacctggcccacacccgtcaatcaccctggtcccgcccctccctgtcaatctctcccagccccgcccccagagcgagaggcggagtcaggcgttcaacccgtttattccgggtttttattttattggcaccggggtctcccgcaggggccgccacgctcctgacgtcacggccccgcccattacgttaaggcagcagcgggaagcaaatgaggggcggggtccctagtgatgggcagaagccgcaggccccgcccccgacgtcagtgcggatatgctaatgaggcactggaagcagcgcgggggcggggctgagcatcagatatgcaaatgagctggcggggattccccacaggcaaatgagctgggcggggccggaaccgaggctccgcccccgaaagcaccaggactttttcatttcctgatatgtaaatgagccggcgcgggctgcgcggggggcgtggccatgcggatgagcccccggctctgattggcaccacaggccccgcccctcagagcgctccttatgcaaatgagcggcagggttaaggctttggcgatttgcatatgcaaatgagggcctggggccctggccccgggattgggggcggagcccggagatgtcagagcgctgacgtcacgcgcatgagggcgtggcctcgggttcttcctctccgccgagcatcacgggagtcgtcactgggcggaaccggctacacgggggcggggcctgaggggagagaaccggaagttagggcgacggtgacgtcaggggactcaggggcagggcccgggaagtggatggtggggcaggaagttccggctgcttcgtgacgtgattgacaggctccgctcaggtgatgcccctggctgacatcactgaagacccagcccgggtggtgaatgacgtcacaaggcagtgaagggggttcccgattgtagccacgcccctcccgggtatctgccccgccgctgtcagtcagggcacggaagccccgcccctcccggggccccgccctcaccgctctcccggaagcacagccgccgcttctgataggccacgaagctcgacaccgcgccggccagggcggcgaccacggcgcccacgatgccgggaaccaggccctggggggaccctgtggggggagagagcggcgggcggggtgctcagtgctccccacatagtgctcagtgctccccacacagtgctcagtgctccccagacagtgctcagtgctccccagacagtgctcagtgctccccagacagtgctcagtgctcagtattcagtgctcagtgctcctcactcagtgctcactgctcctcactcagtgctcactgctcctcactcagtgctcagtgctcctcactcagtgctgagtgctccccacagagtgctcagtgctcctcactcagtgctcagtgctcagtattcagtgctcctcactcagtgctcagtgctccccagacagtgcttagtgctcctcactcagtgctcagtgctcagtattcagtgctcagtgctcctcactcagtgctcagtgctcctcactcagtgctcactgctcctcactcagtgctcagtgctccccactcagtgctcagtgctcctcactcagtgctcagtgctcagtgctcagtgctcctcactcagtgctcctcactcagtgttcagtgctcctcactcagtgctcagtcctcagtgctcctcactcagtgctcagtgctcctcactcagtgctcctcactcagtgctcctcactcagtgctcagtgctcctcattcagtgctcagttctcaatgctcgccagacagtgcttagtgctccccacagtgctcagtgctcctcgctcaatgctccctagacagtgctcagtgctccccagacagtgctcagtgctcctcactcggtgctcctcactccgtgctccccccctcctccctcacctccggcttccggctctggttcaggaccccctcggctgccgcctctgcctgcaagggaagagagggcggggctccggtgacgtcaggggcggggctcgggcgtgaccggcagtgtcactgacgtcacagggaggctctggggggtggacggcggggcggcgcgggggtctgggggcggggtctctgttgagtgacgtcaggggcgcggtgtgacgtcggtgacgtcgggggcggggcctcacccttgccgccggccgcgtcctccaggtcggtgatggagaaatcgcctgtgggcggggccgggaggtgacgtcagcgcactcatttgcataaatcataaatcacgacacagtggcgggcggggttagtgggggaattagcataaaggggcggggttagtgggggattagtataaaggggcggggatcccggtcgctggcagagcgccattagcatatatgcaaatgacagggcctcgctgacatctgcggacagaccccgccattagcataaattagcataggggccgggcatgcaaatgagcccctcgttagcgggggaggagcatagagtgaattagcataaaccacgcctcgcatgcaaatgagccgacacaggattagcgcgggcagctgacctcagcgtcatttacataaacggagacgacgtcaccgcccattagcataaaccaggccacacagggaccgcgattaccatacatgcaaatgaggaggccggattagcataaacggaggccacgccctgcaggaggagcagggttagagcggattagcataaattagcatagccggccattagcacaaacccaggccccgcccccccgtcagcacaaacccaggccccgcccctgaccccacctccgggcggcggccgcggcttcggatccggcttcggctggtcccggggtctggacgggttggggtctgcggagggcgaggggcggggtttatggcacatgggggcggggccagagcctgaggacccgcccttgtctggatcctggaatccccacgcccatacctgaagccccgccccctcctcctttagcccctcccctcctgattagccccactcctcctcccgtaaccccaccccctgctcaccgtctccgtccagggcgtcactcagatcaaagtcgttacctagaaacagagggggcggggctagcgcggggcggggccagggaagcacagggtgtggtcaggcagtggtgggcggggccagtcaggcagtgggcgcggttaggtaagcagtgggtggagtcacatcagagaggaaggggccggggtaatgggtgtggtcacaggacaaggctggggtgtggtctcgggtgggcgtggactcgggtgggcggggctgctccctcaccgccccgcgatggtttccttggcgtcggtttcgcctcctttgggtctaacaaacaaaatcagaacagtgaggagacttcggagacactcggggggactcggggggactcggggtgactcggnnnnnnnnnnnnnnnnnnnnnnnnnnnnnnnnnnnnnnnnnnnnnnnnnnnnnnnnnnnnnnnnnnnnnnnnnnnnnnnnnnnnnnnnnnnnnnnnnnnntgtatgtttccacaggacgcctttccatgtgacggtccacggacgtgtgtggggctcacgtgtcaccgacacacgtattcacggtgacacgcgggggacacacgtggcgagtcaacccctgccagccccggctcacgtgtcagtcacgcgtcacacatcagcaacgcgcgcgctcagagtcgcgtgtcaccgacgcatgctttcacaggacgcctttccgtgtgacggtccacggatgtgtgtgaggctcacgtgtcaccgacacacgtattcagggtgaaacgtcagcaacacacgtggcgagtcccgcccccagccccggctcacgtgtgagtcacgcgtcacgcgcacgcaccacgcccgtcccgcttacctgccccgcgtactccacgggcttgagtcccatgtagacgggaatgaagctgctggcgaggagaacctgtgcgcgggagaacgcgggacacgcgtgaccgggaacacgcgacgtgacacacgcaaggacacagacacatgcatgaacacacgcgggcacgcgcacataacacgggacgcggctgtgagggaaaacacagactgcccgtgtcacggccgcacacgcgtgcagggacggggacacgcgacgcgcgtgcgccccgcgcgcgctctcacctggatgaggtcgtcacgggaagcgaagcaggacaccaggcggttctcgcgtgtgcgcgcgttggtgatggacacgtgcagccggtcacgcgccagctcgtgtgcgttcgcggggaggatccggtccacgccgctcctgcgggcgagagggcgagcgcacacgcgtgtgcacacgggacagacacgcgtgcccgagagcaccagcgtgatgtgcgccaggccccggtcgcacgcatgggcggacggcgagacacggtaaggccctgtggtcgcgtgtgcgcgtggcgcccccgtgtgcgccgagcgcgtgtggagtccgtgtatgggtggacacggagcacacgcgtgatcaccgatgcacgcccgggccgtgcacacacacgtgaggacccgggtacacgctaagcctccgaccgcacacacggcaacacctgacacggttcccggcaccctctgcgtgtgtgcggcccccacccgccccgcgctcacgcgtgtgcacctcagccgctccatgaagtcgaagccgggcgtggccgggcccagaacctgacgccgcgtgtcctcggccagcgcgtgtgcgaagcgtgtgcaggcctgggggggagagagggaggggtgagagcgactgtgcgggcgccaaacccgccctaggatgccatcccgtatcgcgtgtgtcacgtgtgcgtcatgcatgtcacctgtgtgtgtcacgtgtgtgtgtctcctgtgtcacgcgtgggtcacgcatgtgtcatgtgtcacgtgggtgtcatttgtgtgtcacctgtgtcgcgagtgtgtcatgtgtgtgtgtcacgcatttgtcatgtgtgtgtgtgtcacatgtgtgtcatgtacgtgtcacgcgagtgtcgtgtgtcatgtgtgtcacgtgtgtgtcacctgtgtcgcacgtgtcatgcgtgtgtcatgagtgtcacgcgtgtgtcacgtgtgtgtcacgtgtgtgtgtcacgtgtgtgtcacctgtgtcacctgtgtcgtgcgtgtgtcacgcatgtgtcatgtatgtgtcacgtgtgtgtcgtgtgtcatgcgtgtgtcacgtgtgtgtcacgcgtgtgtcatgtatgggtcatgcgtgtgtcgtgtgtcatgtgtgtgtcacatgtgtgtcatgtatgtgtcatgcgtgtgacgtgtgtgtgtgtgtgttgggcgtgtgtcgtgtgtcatgtgtgtgtcatgcgtgtgtcatgtgtgtgtcacgcgtgtgtcgtgtgtcatgtgtgtgtcacgtgtgtgtcacgcgtgtgtcatgtatgggtcatgcgtgtgtcgtgtgtcacgtgtgagtcacgcgtgtgtcgtgtgtcacgtgtgtgtgtcgcgcgtgtgtcgtgtgtcatgtgtgtgtcacgcgtgtgtcatgtatgggtcatgtgtgtgtcgggcgtgtgtcgtgtgtcatgtgtgtgtcacgtgtgtcgcgcgtgtgtcacgtgtgcgtcacctccagactcccgggcgccgtcagcagcgccgccgccaccagggccccggccgaggcgcccgcgaaggccgtgacgtcacgcagcagccccgccccgtgggcgcgcaacgccatggccgcccccaggtggtacacgcccaggaagccgcaggccgcgaaggacacgcccacgggccacgtcatggggcggggccggcggctcctgcggagacagacatgagacagcacctgtgactcgtgcggtggacacgcgagcgcaggccccgcccctccctgtgactgacaggaagccccgcccctcccttcaagcccgttccccggcacgaactacgtttcccagcatgcccagcccccctgtgacgtcactctgcgcccgccccaagctttcggccttggttcccccggggttcccgctcccgccgcccgggagaaaccacaactcccagaaggccgcgggacaggggcgcgggtcggtgacgccatcagctgggcctctcccgcccgcccaggacccccggccacaccggcgcctcacgcgaactacgtctcccggcggccctcgcgcaggactggtgccggcctctgacgtcacagcggggagccgggcgaccccgagacgaccccgcaaccggcacccactgcgcaccgcggactccgtttcccaggggtccccgcggcggtggcggcgccggcggcggacgagtgacggcacaggcggctcccgcggttcccggtcgagtccgcgacgtctcccggggtccggcgaaggctgcggcggctgcggcggcgttggtcgcgtctttctgacgtcacatggagcgccgccggccgcgctcggaactactaaaatggcggcggtttccccgcgttccggggcgcggggcggctcccaggatgccccgcgcacgcacgcggtccccggattgtgacgtcagagcagggcgacctcacggtcctgaaaccggggacaccgccttcggttttccgtgcggcccggtatcggggtcgccgggagtgaacgacggctcccaggattccccgcgtgcgtcttcagctgtcgcgtgtgtctgacgtcacagtcgccgccgtccgcggtccccgcgaggagaatggcggcggattccgcgaactacggctcccgggatgccccgcgctggtcggcggcaaacgtggtcgcgtctgtgacgtcataggccgcgcctgcgctgccaccgaccccgaggctgcggcgtctctgacccggaagcggccccggctctaagtcgctgttgtttctcgctcactgccgtgtggtcattttcagggtgtttattgtagtttcttgttattaattattttattttttattgttattgcttactagttattgtttgttattcatttattttgttatgatttattattatttcctttcattggttattatttattcattagtttttatttattgattattatttagtatcatttttattatttcttatttgttttcatttattatttattttattattttgtttatttattattgcctgttatttattttattatcatttattattagttattatctatttagttattgttttattttattatacattattaatttattaatttctactataattttatttatttttatctgttcctcatttttttcatctccgtcgcagccgccgttgttgtcatttcctccccggccgccaatgtttcctctcccgggtttggggcccccaggttaatttgcatctcatttgcgaaccgccatctccagccccgcccatgccacgcccacagcgtctgtcactcacaggccacgcccacacccgtccgcgctcatccaggacaccgagggcagagggcggagctttattgacgatcagtgtaggccccgccccctctgaaactccgcttcctgttccctgacctctaaccccgccccatccctggggaactgggcgtggccacgggatccccgcgtccctcgatgacgtcacacggaggggcaggggcgacgaggtcacactgaggtcattacacggtcccggagtctgtgggcggggccgggggaggggcggggccgtgaggggcgtcggggaagccccgccccttccggccccgagtgattgagggggtggagacagtttggggtcgaggccgtaggtaataaatttgcataaagtttccgggtttcactggtgggcggggtcttgttgtgggcggagtcaggggcggagtttggaagcacagggcgggaacaggactcagagagtgagaggggagggggcgtggtcagggggcgtgtccactcaccgccccgccccaggcagccgcggccccgccctgaccggaagtagctgacgccggcgcccagcagcgcgaccacgacgacggagacgatgggggagacgatgcgcgcgacggtgttgcctgggggcgggacttccggttacacttccggccacacttccgccctcctcccaccttacttccatttccgcccacttcccctagccccgcccctggggtcaccccggggtcaccgctcgccttgtgtggagtcgtgggtcaggggcgggactccgcctgtgcgtagggcgtggtcagtgacgtcacgggagtcagggtgtcacgcgggggtcagattcgcacagggagggaaggggaggggacaggaagtgagggaaaattctcacccccctccccaggccccgccctccccaggccccgccctcaccgtgggaatccccgtggccgccgtagctgccgaagccgccgtttcctgttggggagattaggggcggggtcactgattgtcaggggcgtggtcagtgacgggggcggggacagtgaaagggcgggcctaacgaggagtccctgccaatcacgggggagcctggggcggtgctgtggatcgcctgtgacgtcacagactcgggagcagcgcctgacatgatgacgtcaggtggagatggcagagatttgcgttattgagaggtgattgacataacggggcggggcccggtgtggggggcggggcaggggcaggaggggcggggcctcggtttgtgataaatttgaactgatttgaacgaacccgaaactaatttgcataaccgggaactacggccggagaagtgggcggggtcagggcggtggattgatttgcataaccagccccgcctccttctcccgggggcgggaccagagcggctgatcattccccggggaggagcttctgcttctgggccgcatttgctggtgacgtcaccagccccacccctccgctgaccccggcctcacctccgtcctcgtgctcgcccggatgtgggcggggctgtgggcgcggcctcggcggctgtgggcggggcctgggaggcgggtagacgcctgtggggggaggacatccggttcccggacacgcccctgaactcaaccccgcccctctggtctgtgacacccggctctgccacacccggccccaccccgtccccgcccgccactcacttccgccctgggggtcagagggcagcgggtcctgcgggagcctcgggtagagacctgcggggatttgcatagatctgaataaatttgcataaattaacataagccctgtgagtcctgatcccgggaaggggcggggccgagatttgcatgtcccgcccacatacgcatgcgtgagcgatgtcagagggaaaggtggggggcagaaacctggatttgcataaatttgcatacggagccccgccccgctgtgcaccctcacgcactctgatttctgcgttcatttgcattgatttgcatatgtctgaatttgcataacaaaccccgcccccaacagcgtcacaactcaccgcctgacgggcgcgagggcggagtcgggtctgtggggaaaaaatcagtgagcgaggaggactcagcacccagcacccggcacccagcacccagcacccggcacccagcacccaggacccaggacccagcacccagcacccaggacccagcacccagcacccagcacccagcacccagnnnnnnnnnnnnnnnnnnnnnnnnnnnnnnnnnnnnnnnnnnnnnnnnnnnnnnnnnnnnnnnnnnnnnnnnnnnnnnnnnnnnnnnnnnnnnnnnnnnngagcactgagcactgagtgaggagcactgagcactgagtgaggagcactgagcactgagtgcggagcactgagcactgagcactgagcactgagtgaggagcactgagcactgagcactgagcactgagcactgagcactgagcactgagcactgagccctgattgacagcccgggaccgggtagtgttgggttaatttctgccctgattgtcagcgcagtcatctctgttttacaggaagtcccgcccctcctcttccgcctgtgttctcatccgcgcgttacttttctcatgattgacagccgcgctccgcattgcggacaggaagtcccgcctctgcacttcctgccgccgttttggggtttgctctgcgcgttatttttcgcccggtttgacactgaagtcctctagcccggggaggaagtcccgcctcctcacctcccgtcgccattttcaaataactctgtgcgttaatttttgcccagattgacacccggttcccggtgaaggacaggaagttccgcctctccgcatcccgtcgccgttcctgacgcactgtgcgcgttattttctctcctaagggcagcggggtcgtcctgagggaccggaagtgccgggcgcgcgcttccgcggtcatcacggtcacagggagcgcgttattttccgtctctgctgacaccgcgctcgcgggtgagggaacggaagtcccgccccatcccttccggtcgccatgttgcgtgtactttgtgcgttattttccgcacggactgacacgttcggcgcctcggtgacggacaggacgtcccgcccagacccttcctgttgctgttttctttatcgtgtctgcgtcaatttcacactgattgacacccagattccccgtgcgggacaggaagtcccgtcccctctgagttacgggcgccatgttgtttgtagtccacgggtttgttttcgctgggtttgacagccccgcagcgaggtagccgacaggaagtgccgccctctcccttccggtcgccatgttgtttgtagtccatgagtgagtttcgccctgtgtgactgcccggcacagccttgtttttctccgagactgacagcgccgtttcccccgtgacggacaggaagttcctcgttcgccattttgtttgtagtccgcgcgttatttctcgggcactctgacagccccgctcgcccggtgacgaaccggaagtaccgtccccgccttccggtcggccgtctcccgggcgcgtaggcggaaggggcgggtccccggcggccagggtcgtcccgcgggccccgccccgaccggaagccccgccccgccggccccggcgcagccgcggaagccccgagcccggcgcgcgcttcggtccgcggggtccgggccgggcgggggtcgcggagggcgtggccggcggcgcggggggcggggccgggcgggcgcggggggcggggcggtcccggggggcgtggccatgcaggcgctggtgtcgccggtgacgaaggcggtgctggtggcgctgttcatcttcgcgatcctgctgatcctgtacgtgatcctgtggtacatctgccgcgacgtggactgcgaccacggcctgtgacgtcagcgcgtcacccaccgcgtcatcgcccgtgtcgtcatcaccagcgagtgacgtcatcataaccgtcaatatacatacacacacatcatctgcgcgctgatcctgtacgtgatcctggggtacatctgccgcgacgtggactgcgaccacggcctgtgacgtcagcgcgtcacccaccgcgtcatcacccgtgtcgtcatcaccagcgagtgacgtcatcgccaccgtcaatatatatatatatgcacacagaccatccgcccgctgtacgtgatcctggggttcatctgccgcgacgtggactgcgaccacggcctgtgacgtcggcgcgtcacccaccgcgtcatcacccgtgtcgtcatcaccagcgagtgacgtcatcgccaccgtcaatatatatatatgcacacagaccatccgcccgctgtacgtgatcctggggttcatctgccgcgacgtggactgcgaccacggcctgtgacgtcagcgcgtcacccaccgcgtcatcgcccgcgtcgtcatcaccagcgagtgacgtcatcgccaccgtcaatatatatatacgcacatagaccatccgcccctgtacgtgatcctggggttcatctgccgcgacgtggactgcgaccacggcctgtgacgtcagcgcgtcacccaccgcgtcatcgcccgcgtcgtcatcaccagcgagtgacgtcatcgccaccgtcaatatatatatacgcacatagaccatccgcccctgtacgtgatcctggggttcatctgccgcgacgtggactgcgaccacgggctctgacgtcagcgcgtcacccaccgcgtcatctcccgtgtcgtcatcaccagcgagtgacgtcatcgccaccgtcaatatatatatacgcacatagaccatccgcccctgtacgtgatcctggggttcatctgccgcgacgtggactgcgaccacggcctgtgacgtcggcgcatacgggtgacgtcatcatcagcgtcgtcatcatccgtgagtgacgtcatcgccaccgtcaatatacatacacacatatcatccgccccagtacgtgatcctgtggtacatctgtggcgacgtggactgcgaccacgggctgtgacgtcaggacgtcacccaccacgtcatccaccgcgtcatcttcatccgtgagtgacgtcatcgccaccatcaatatatatatatgcacacacagaccatccgcccactgatcctgtatgtgatcctgtggttcatctgccgcgacgtggactgcgaccacgggccgcaacgtcagtgcgtgacgttgacgtcatcaccagtgtcgtcatcgtgtcgtcatcacatcatcaccgtatatatgcacacatagatcatcttaatgctgtacgtgatcctgtgcttcatctgccacgacgtggagtgcgaccacaggctgtgacgtcagcgcgtcatccaccgcgtcatcacccgtgtcgtcatcaccagtgagtgacgtcatcatcaatatatatacacacatagatcatccgcctgctgatcctgtacgtgatcctgtgcttcatctgccgcgacgtggactgcgaccacgggctgtgacgtcagcgcgtcattgcgttatccattgcgtcatcttccgtgagtgacgtcatcatctatttatatatatatatatatatatatatatatatgcacacatagatcatccgcccgctgtacgtgaccctgtggttcatcggcctctgacgtcaggacgtcatccatcgcgtcatccgtcagtgagtgacgtcatcatcaaaacatcaccgtatatgtacacacatagatcatccgccccctggtcctgtacgtgatcctgttatacatttgccgcgacgtcgactgtgaccaccggctgtgaggtcagcgcgcgagggtgacgtcattatccgtgtcgtcatcatcagtgagtgacgtcgtcatacataaatatgcatagatacagatcatccgcctgctgtatgtgaccctgtggttcatctgactcaacgtcgactgtgagacgtcgactgcgaccccggcctctgacgtcacgacgtcagccaccgcgtcatcctcagtgagtgacgtcatccgtcagtgacgtcatcgtcacatcaatatagatatagatcatccgcccactgaccctgtggttcatctactgtgacctgcactgctctgtcgtcatgacgtaacacgctacgtcatctcacgtcatcatcagactcagatctaccgcgacctgtcatttggcgtcagtgggacacggctgccgcatcccagtgacgtcatcagtaacgtcgctcatctgctgtgacgctgactgacaccgcaacctgtgacaccatcacggacgagggcagcgagggcgtctgtgacgtcagagagtgacagtccaggtcggtgtcccgcagagagtgtgacgtcagacaacagtcccgccccgccgtggggtctccgacacacacgtgggaggtcagagtgaccccagggtgacgtcagcgcagagcgaccaccgagtgaccccagagtgacttcagcacagagtgatcccagagtgacgtcagcacagagtgaccccagagtgacgtcagggaagagggaccccagagtgaccccagagtgacgtcagcgataccccgtaccgaccgcgagcccaggacctgacgtacaggtgagtgaccaggtgacgcaggcagagttatgcaaatgagtttgggtgacctcaacgtgacccctgacgtcaccctcgaggccacctggacccctccctggaggcgaccccctacctcagctcctacgtcagcagtgcgggcagctggttcctgcggagccatcataattcatgcaaattcatgcaaatttatgcagatttatgaaaattaacgctgacgagggtgatctgagctgcggagacgatgaacgcaaatctccgcggctcccgctcgctcctcactgagcgcagtgacctcacgtgacctcatgcgacctcacgtgacccctcgaagggcagcagcgttctgctaattaagaactcattatgctcattcatgctgattcccattaactggatgacgtcattggggtgggaacagtgcccagcatgaccttgcggcgacccccgggtgacaactgtgacgtcaccaccctcctcctccacccccgccaggtgaccccggtgacatcatcgcgaccctgagatggcagcgggagaccccgtgtgacccccgtgtgacatcaccgagaccccagcgacgtcagcactaatcccggagcccaggtgagggtgcgaatgggcgccgtgacccctctgaccttgtgacgtcacagggcactgcggatcctcattggcgtaatatgctgacgcatttgcatatccgttaccccagcggccggggtggcttccggtctcttttacatgtcatttgcatggctcctcccccagggtccgccaggcatcccggtcatttgcatacgatttaaacgctgtcattttaacccaaagggaacgcggagccgcctcatttgcatgtccccgcccccgtttccaagcccgctgacgccacgccccccacagggcctccatgcatcccccaggccgccaccggcccacccccgccgggttcccgcccccgaccgacagtagcgccgccccctgatgtcacgggcggccccgccctccacgccgccaatcatcctgccaagccatgagagggcggggcacccaggccggacccgccgaagtcacgggccacgcccacccgccacgcccagccatgtcttcctctctctgcccatcacgtgcctggaccctgtgacgtcacccgagacctcccgtgacccctcgtgactcaacgtgaccccaacgtgaccccaacgtgaccccgagccctgcgtttccaccctgtgacgtcatagtccgtccatcagtccccgagctccatgttctactcagtgcagagtcatcaggccacgccccgtgacgtcacatccgctgtgtctgggggagggggcggggacatcgatgccaacaaagaaataaataaataaaaatggtatttttgacgtcgcgcgtgtgacagtcacgtgattgggcccagggggagtggcggggcaaacgggccacgcccacatgtgtcaatcattagtgatggccacgccttcagcgatggaaaattcaaacctgtccatgcccatgatgattgtctataaagagggacacgcccacaccagcgacctgtaagtgacctttccgtatgaatgagaaggcggggtctgtgatggtgactgtgagggcggggtctgtgatggtgactgtgagggcggggtctgtgatgatgactgtgagggcggggtctgtgatggtgactgtgagggcggggtctgtgatgatgactgtgtgagggcggggtctgtgatggtgactgnnnnnnnnnnnnnnnnnnnnnnnnnnnnnnnnnnnnnnnnnnnnnnnnnnnnnnnnnnnnnnnnnnnnnnnnnnnnnnnnnnnnnnnnnnnnnnnnnnnnggggggggagactcggcagtgactccgcccccgaccccgccccggccacgcccactcaccatccagcgcatctgacagatccagatctgagaaagagaaaaaaaaaagcctcagcgccggccacgccccggccacgcccccccgggtatcagcctgaagcacccctgggaccccacccttccccctcctgccgccgcgaccccgccctgggctccctgagtcaccggccacacccggtctgagtcagctgccgccgggcggggtcacgccgggccgcggagggggcgggggagccgcgcggggcaaaaatccccaaataccaaccccgccccgcccgccgcggggactcagcgcagccctggctctgagaagcggcgagtttgccgcgggcggggtcggcgaggccgcgggggcggggcggggtctcagcgcagcagccgatacagtgaagccgcgagtgtgctcacgggggcggggcgggcggggccgcggggtccctgagggtcacacggggtcgccgggcgccgcccctgccgccgaaacgaccccgcccgcgaggacgacaccgcgcggctgccgggcgggccgggcggggagcaggggcggagccgaggccccgccgcccccgccgcagaccccgggagaccccgccgcgagctcggcctgagacccccgggcggggcggctcggcggaggcggacgtgaccccactgactaagccgcgccggcgccggggactcctgggaaaccccgggcgacccgatgccaagcgtgctgcgcctcggccacgcccaccggccccgcccggacagggaatcccgcgctgagggagccgcacgggcggcgtcgggggtcccgtttggggtcgggggtcgcggttggggtcccgggtcccgccccgccctccccgccccaccccagggccccgcccgccacacagacaacaaacaaagcgtcaatctcggcgcggggcgggtccggggcgtggcctgggcggggccggggccgcaggtccttgctcccggctccccggggtccggtcccggcgaccccggccccacccagggggaaccgagcacccagcacccagcggggctgcagcggggagtgggcggggcctgggcggggcctgggcggggccgcgcgtccatcacggggtccgggctgccccgcgccccgggatccgggagatccgttccgaccatgcggggcccccgggggcgcgcgggacccccgaccccgccccggccccaccccggccccgccgtgaccccgccgcgacccctgaccccggggtctcctcaccctggcccagcacgggcgccgtcagcagcagcaccagggagacgcgggcgagcagcgcgggcgccatggcgggagggcggggccggggcggggccgcggcgaggccacgcccactgtgagtcacccgcgctgagagcatcaggttgaggcagggacgctgagtgacgggcaggagggagggggcggggccggcggcacggggaccagtgagggagggttgggcggggccggggcggggccccagcgaaggccacgcccacaataggcatagcgggtttgcaaggtgagaaatatgagatgattgacagcgggccggcctgggcggggtctttcgtgagggcggggtctgggttgggtcaacggggcggggtcagctgacgtgggtggggccagagcgggagccacgcccagggtccaggaatccctgctgtaagggtggtggtgagtgattgacagctgcgtcaagggcggggctgcgagtgagggcggagctacaggctcccgggggttgggttagaagcacggccacgcccacatcggggagggcagtgaggatgagaggggtgggcgggaagcgattgacaggcgggtgggcggggccactgctaatgagcggtgctgcaggcttcagggacccggagagccacgcccatcgcgtttgcatatgctgatgagcactgagtgaggagcactgagtgaggagcactgagtgaggagcactgagnn

SEQ ID NO: 48 - DNA, 50 bp, Artificial Sequence
  Ad1_noMx_Primer
aatgatacggcgaccaccgagatctacactcgtcggcagcgtcagatgtg

SEQ ID NO: 49 - DNA, 53 bp, Artificial Sequence
  Ad1_2_Primer
caagcagaagacggcatacgagattcgccttagtctcgtgggctcggagatgt

1. A method of producing an engineered Chinese Hamster Ovary (CHO) cell, the method comprising:
introducing into a CHO cell a construct for integration of an exogenous nucleic acid molecule into or within 500 kb upstream or downstream of an expression-enhancing sequence in the genome of the cell, the expression-enhancing sequence being at least 90% identical to a sequence selected from any one of SEQ ID NOs: 1-47.

2. The method according to claim 1, wherein the expression-enhancing sequence is selected from any one of SEQ ID NOs: 1-47.

3. The method according to claim 1, wherein integration of the exogenous nucleic acid molecule is within 100 kb upstream or downstream of the expression-enhancing sequence.

4. The method according to claim 1, wherein integration of the exogenous nucleic acid molecule is achieved by the CRISPR (Clustered Regulatory Interspaced Short Palindromic Repeats)/Cas9 method, TALEN (Transcription Activator-Like Effector Nuclease)-based method or ZFN (zinc-finger nuclease)-based method.

5. The method according to claim 4, wherein integration of the exogenous nucleic acid molecule is achieved by the CRISPR /Cas9 method.

6. The method according to claim 1, wherein the exogenous nucleic acid molecule integrates at two or more integration sites in the genome of the cell.

7. The method according to claim 1, wherein the exogenous nucleic acid encodes a polypeptide.

8. An engineered cell produced by the method according to claim 1.

9. A method of producing a recombinant polypeptide, the method comprising:
(i) introducing into a CHO cell a construct for integration of an exogenous nucleic acid molecule into or within 500 kb upstream or downstream of an expression-enhancing sequence in the genome of the cell, the expression-enhancing sequence being at least 90% identical to a sequence selected from any one of SEQ ID NOs: 1-47, to produce an engineered cell,
(ii) culturing the engineered cell to recombinantly express the exogenous nucleic acid to produce a recombinant polypeptide encoded by the exogenous nucleic acid, and
(iii) isolating the recombinant polypeptide.

10. Use of a nucleic acid sequence being at least 90% identical to a sequence selected from any one of SEQ ID NOs: 1-47 for transgene expression.
